United States Patent Application Publication US 2026/0324648 A1, published October 22, 2026 (application 19/108,695).

The application's sequence listing, which the Patent Office published only in electronic form, follows.

SEQUENCE LISTING (32 sequences)

SEQ ID NO: 1 - DNA, 4277452 bp, synthetic construct (residues 1-2,138,726 of 4,277,452)
  source 1..4277452: mol_type = other DNA
ttcgattctactaaggctccatgctcttccgcttctacaaactcgccattctcattcagcgaataccaaacatccggctcaattccgttctcgcctactttactggcacggatatgaattagttcgccttcgccatttcggtagcacaggacgattgcgccgctttctgacgctttagcctttccaccatcaccgaatgaagccgctacagattgcgatccagacacctctgccgctgaccagtcgccagtgttggttgccgctgaccggttgccagtgttggttgccgctgactggtagccagtgttggttgccgctgaccggtagccagtgttggttgccgctgaccagttgccagtgttggttgccgctgactggtagccagtgttggttgccgctgaccagttgccagtgttggttgccgctgaccggtagccagtgttggttgccgctgaccggtcgccagtgttggttgccgctgactggtagccagtgttggttgccgctgaccggtagccagtgttggttgccgctgaccagtagccagtgttgattgccgctgactggttgccagtgttggttgccgctgaccggtcgccagtgttggttgccgctgactggtagccagtgttggttgccgctgaccagtcgccagtgttggttgccgctgactggtagccagtgttggttgccgctgaccagttgccagtgttggttgccgctgactggtttccggtcatgatctgctgttcaagcgacttatcaactttgctccagatccaatcaatcccgcgctgaataaactgagggagggttagttcttctgtgatggttatgctggcgcttgcgatttttgtatcgccatcatcttcgcggtcaataacaccaaatgattcagttactgcataccggctatttgttggcgggtaatatccgaaaacatcaaatgggcattcacaagcgtggaagccagagccgcatgcctcgaccttgccctcatgcgtatacgttttgccaatttcgaactggtagccacggcactgaagattttggtcgaagcctttaaaggtaataactgtttctttgctcatgctgcttccttgaatttttggaataaaaaagccgcattaagcagctcgttgtttgtttcagtggtcttattgctgccaccggttaagtggcaggggtaagatcactggggttccgagatgaaatctaatacttcctgtaaatcaccgtcacacagagctacatatccatccgcatgcattcgctgaagccattcaatgcttatgtttcgatattgactcatcattcattcctcatttaccagccaataaaaaaggccgcgttatgcagccttgaatcctgtaacctcaatccgacatatcggataggtataaagcttgttgtcctgaacaatcttctgcgcagcttccatgctgtcagcgctgtcacagaacttaatgttctcgtaatacgcgccgtcgtcgttatccggcttgccagccagaacagtgaaagaaagtgtcattctcttaccccttaaccatttacccgccaataaaaaaggccacctaagtgacctctataatttgagctgggatatttatccacgcccagccgtggtttccctgctttccacagtcaaaggaaattgatatgttggttattccacagtcaatatagggatttagaaatggcagattttactgttagggttgagttgcataatgctgacgctgatgactacgaaactcttcacgaaaaaatgaaygcaaaggggtatcaaaaagaaataaccacagatggtaaaacttataaattaccgaatgctgaatatgtctgtagtaaagatttatctacacctgaaattcgtgatgatgtactgagaattgcaaactcggtaaagccaaagtctgacgtattggttacaaaatctagcggaagagcatggagccttagtagaryctamtaatcttgaccgagcttctccttttcctcattattttctgtggaataaagctcaataaatgcctctcttacctctcgggccagtgttttaactggctctatttgctcatccatccccatacctaaagtagaaagtctgtttgaaagcgtttgggctgcgattaactgcatttcaagtggtaactcgacaaatctcataactacctctctgtttaaataagttgaatgctgctacttaacaatgtgtgttgcttctttacggttggtgcggtacccagcgctaaatatcgctacctgaggtaaacacgtcttaccacctaacttctttgctgctggctccgtgaagcacttgcgacgtgcgtcgcgtatcttcgccagctcacaatctttcgcgcccttgtggtgctgctgaatgtgcataagcggtatctttgggttgaagtccaatccgcacaccggacaacgaatttcattcttcatttgccacctctcgtttagagaacttatgactgccgcctacacctgacagcgacagggtataaattcactttctccttaaagaacacttagcggtcgatccctctcggggccgggggtgattacatcgctcaccccgttgcgtgctgcttagttggcgtcctgccgtgttgatggaatagataatagctttggatataatacatgtaaatagccaaagatataataatatagatttagctatttaattattgattgataaaggtatttatttttaaaaataattcaggcgtgaccattcgcaccggctatcaggcgtgaaaagtgtgaagtgagttgtgtttaatacgggtagagtggtgagattgtcagattacaggcacaaaaaacccggcagcggggccgggttattttaatattatcgagaaaagtgttggccctttattgtcagagctcatctgtcaaatttagctccaatgtgccgtttttcttgggcatcacttggtctaccgttttgacaaatcgattccatccatgtccattagatatagccaacctttgtagcataattaacgagtgaaggtgctgagatagcattggattcccaatatctgaagttaaccattggtgtaatttattttttctattacctttatcgtctttgggggattttttttcaagctctgaaagaataccatctcccaatcggtcataaaccaaatctctggtgtagtgtgaaacaacgctatacctgtttttactcatcccttgccatggccaattttttagcttgtaaatattttcgtagaactcatcagggaattttttagcccaagcagcaagttctttacttattattttattaagaaattcttgaagtgcatcccttggtcttacctcttgatacccagtggcctcatcaaccagagatacaataccaacccttgcaaacgccctgataagcatgtctgaatactgagcatatctaaattcctgctctgtggttaacaggttcccatctctggcagcaaggatggcctcgcataactcctgaagaatggtagcttcaaagccatccgcaaaaacattggtgttacttgaaccctttataggaaaggccccaatgaactttattgggttttcgatggccaatattaactctttgtttttgcttgggttaagcattttatgacccgctaaacgggcaaccccttggccacggcctttcatacctattgacgccgttaagcttcttcctgatataacccttcgaccatcatcaagaacaaagcatggaatctttatccctgaaatatcaatctcgcctttatgggtagctttaggcacatttttagccaccgcacccattctagctatttcctttcttctttctgacgaaagggagtcagctctcgctacccctccctttgattgcttgctttccatacactcagcctctcaactttgatgatgagaacaatctttatacaaaaggataattctagcaagcagtttatgtaattgtgcttgctataaacattccggtcgggttggttctattggcggcctaatgctatctatgaactgggatgcctcttttttgactgcgtgaaattccagatcgttaaatgccattattcctccttgagctagcagtaggttagccgtgggttagtaatctatctctgaccaccagaacacgcggccaataatttcaatatcttttagattcttctcttcatctggatattcagacttgttgtaactccgcacgctgacacgaccagggcccacacgataaagcatttttactcgcttccatccatcctcattgatcgcgtacatcttaccgtcaattatctttttatcatcagtgttaatggcgactgtcgcaccatctgatatttttggctccatgctattaccgcgagctgggaagcaaagtattccagatccatcagtgttagcccctattcgacgtagcgttgccttggagaatctgagcataaacccgttgtagtcctcatcagagacgcttccatcgccacatgcaaattcaatatccctaaggaatgggacttcaacctcatcatcgtcaagaggggtatttttatcccacgccttaactccaacccattcactttcaggtgggattgttgagtcaggatggtgtgggtttacaccgctttcgcgcattggctctattccttcactaagccattccggccgaacacctaaaactctggctatttgaacggatttccttgaagagttggcttttcctgaagttagtttccagacgctaggctgtgccatgcctacggcctcagcgagagaaccctgagtaaacccaccttctttcatggctaaatttagccgatctgcaaaagtcattttttccatttacttagtctatagccatggctatacccaatcaaatatctaaagctatttacaatatgaatagctttggctattatctgtgtatctacaaaagcaggagttatttatggtcaacgaagctattaagtcggctattaacatcgtaggaagtcagcagaagttagctgaagcttgtgatgttagacagccttccgtttggtcttggttgcatgggaagaaaaaggtttccgccgaaaatgcgaaacgcattgaaaaggcgaccaaaggactaatccctgcataccgaatcagacctgatttaactgacttgttccctcatccggaaaaagcagcttaacaaccaacagcattaaccgaacgcccggtatatggcggccccgaggatctgccaggtaaggctaaaagtcggaggtgagcgtaactaggctcgccataactaaatcacttaaacaacatggaaatcatacgaaatggatagcgcaagtaacagcaagagaattatggaagttgaatctgagctacgtagccgaatggctatcaaggggcagagcaactttgcacgtgaagctggctgggctgaatcaaaggtcagtcggttaaacgtaagagatatggctgtgacgtttgttcttctggaaaagatatgggagacgagcgtgataagggaaatcgcaaggcaggctgtgattgcggtgaccggaaagcaaaaagccccaacacgaacaaagacttcagaacagcaaatttcaatcagtttctgaggtgataagcggagaaatatatggcccgttcaagaaatattaagccgggatttttcactaacgacgaattagcagaatgcagcccatacgctcgtctgctattcgccggattgtggactatcgcagataaagaagggcggttagatgatcgccccaagaagattaaagcgcttgtattaccgttcgacaatgttgattgcgatgaactactacagcaattgcatcagcacaacttcatcactcgctatttagtggatggaggcgcttacgttcagattaataactggaagaagcaccagaacccccactgcaaagaaagtgctagtgagatacctgaacaagtaatgcaacttattgaaactaaagaagcaccagaagagcacggtgcaagtacggtacaagaaccagagcagaacaatttaaatcctgctgattcccttaacctgattcctgattcccctatcctgattcccttcaacacccaagccgctgacgcgccttgccaaattgatgatgaattaccacctgcaaagcaagaggagttatcgccagagcctcaggaagccgatgttcaccagatggcaagccgctatgcattcgagggttctgttgttcgattgagccagaaagatttcgattgctggaagtctctgttcccgaacattgacctgattgttgagctgacaaggctagatctggagttttcccatgagaagccaaagagctggtttaccactgctagcgccaagcttaactaccagaacaagcaatcaaagccagtggcaacaaaaacgagggctgttgctgataacttttccgcaaaaaattacggaaccaccgacacacccgggtggatggaggggtaaatggacctgtctgaaaaaattagtattctgaaaagcaaaatctcagagctgagtaacccgccgaaagaaataccccatacgacagtcgctatcatgtgggcggagtgcgaccatcatgggctctatgagcagcgacaacgcagtatggccaaccttacaacatctaccaaaagcgaatgcccaaagtgcctagccgagcgacttagcgaacttcaaacaaagcaatcagatcatgaacagtggtccagatcgcgccacgttagtcagttgattgatgggcttaatctgcccgagagatttaaatcggcaactttagaaaactatgaaccggtcaatgatgctgcaggtcattgcttacgagtgtgtcaggcttatgcaaacaagtggccagagcgtttaaagcagggcggcggcatggttatgtgtggcaagcccggcactggaaagaatcacctcgcactggccattgctcaatatgtgattagaactcatgaatcatcagcactatttacaaccgcactacgcatcgctcgggcatttaaatcaacatggagtaaaaatgcagaccgcactgagtctgacgttatcaaagcctacacagatcccgacttgctcatcattgacgaagttggcgttcagtttgggtctgatactgaaaagcaaatcctctttgagatcatcaacactcgctacgagaaaatgcgcccgacaattttaatcagcaaccagacgagagccgagcttagcgatttcatcggtgagcgagtgattgatcggatgaatgatggcggcggttgtacgctggcgtttacgtgggatagctaccggtcgagggctgcatgaatgccttgggccaatacatcaaacatcagatagagcagcaagaacgccacgaatcagacctccgtattaaattcctaagcaagttacctgaaaacaccttccaagccatttataaccagtttattcatgatgagtttgcaggtggcgttacatacaacggaatttactacagcgagtgggaaatctatttcgcatcacatgatcgtgacagtgacgcggaagtgctgctgtaaatcaattcgaggaaatcatgatggcttttgtatccatggctgaaatatcacgcccactctccgaaccaaagttaactgtccgtaacaccggtctttgctcaataaatcgctcggtatctggtgagtttgattctatcgaggctgaaatatgcttcgagacaaaaactttccggttcagagttggtgatgggctatcaaaaaggctgagagacggaacaagtttctcgataccaaaggctgcatatctggaaattttagatggtatcggcgggaaaaaggttatgccattaacaaatggccaagacggttggtggtatgccaaatacgagcaaaaaggggtcgcatgatggacataacaacatcgcgggaagagtttgagaagtggctggaagacattcacggtttgtatggggaagatattgattgggagccagagagaaattgttatcgaatttttggcgttcatctggcttggtgcgcatggaaagaatccagagcaagcattgcggtgacacttccaaaaacttgcagagatattgcgggggaagatgcgcacctagacagcgatgagacatcgtttgattccggcataattttatgcgccgaagccctccgctctgctggtctaacggtaaaaggggattgagatggaaattccaagccgagtaaagagcgctctggatgctatggaggcaatgattcgtacgcacgaatatcattttgaagatggcacattctggtcaccagtggttaagcaacaaatagagggtctgcgtattgccaataaaaccaaagccattatctatcacgatagaatactaagcgggaggaagtgctgatgaaagaactagaccaatttacagtagagcagctaagcaatttcattgaatcagaccatgctcaatgtggcgatgtggcagcactggcaagaatcgcgctatcagcaaagcaggccgagccggtttatcaggagcgtaggtatcaattttccggcaagaaacagattgaatattgggctgacattaacaattcaacgtatgggtacctgccaaaaagtgagcgtcgtttaatttataccactccaccatcaggccctctggaaattcctgatggttggattaactgcaatgataatcttccattagaagatgatttgtgcttggcaattgacgaccaaggtgtgatttggacaatgatttttgaggatgatgactttggtccagacacaggcggagtctgccctaacgaaattacccactggatgccactccccgccgcacccacctcacttctagagggagagagtaatggctaaatctgaaataaccctatccaagaagcaataccgccaactctgcgatgcttacatcaacacagtaaacatgatgcctcagcttctgatgattacaccccttcaagatgacaggtcaccagatgccttgtatgcactacaaacggcattgcagattgttcagcagcaactgaaaggagtcgttgatggaattcatggctgacaatatggggaatataccgctaacgataatagcattagtcattgttgtggtgctgtttgcttgcttatgggagtgactatggataaaaaagtttttgttttatgcggtgatcaatacaagcgaaatgccatccagtttataaatcaactccctgttaatcctgataaaccactcctgatcacaatccaagagcgaacccgcacattagaccagaatgccaagctctgggctactttaggcgatatcgctacacaggttgtatggcacggtcagaagcttagcagtgaggactggaagcacatattcaccgcatcactgaaagggcagaggtcagcaccggggctcgaaggtggctttgtaattctgggccagtcaaccagccgcatgaccgttggagagttgcgcgacctgatagagctaattaacgctttcggggctacgcatggcgttaagttcagcgatgaatcacggcttgctatcgagtgggctaacaggttcggcgataagggaaaggtggcagcatgaataactgggacattggaatcagggctttcatagataagccatactccgcagtcaggcaaggctacaaaccgtcggttctcgattgttgggctatatctgccagtgtcatattcgtagtattcaaaggactattttcacacgcacttgatattaccgatttttttgacatgacaatcagagagattggcgagtggttcatgtatttgtgcttaaaactgatcgtggcatcaacatacccattcacattttgggcatggggtacgcttatatatttcttgctgaggaatgaagcgaaaacgcaccgcaccagaagtgaaaagttatctaacctgatttaacccccaatccccgccagcgaaatacccacatatgaccacatatgcgttttgctgcgcgccaaatttgaccgagtaaggagaacgcgatgactcagttaccgcaatccgtatgcgtgtattgatttgatgcttaacaagggtgaaacctacgctcatcagaaatgcgttgataaggcagcgaaggaggccgggaatgatagccaagctcccgaagcatcgaaattgtaaagtgtgtaaaacgagatttaaaccagtcgcgatatacgagtggtggtgctgcgaagagcacaaaatagaatacgcggttctggttatgaaagagaggcgaaagcagaactacgataacgagattaagcaaaggcaggagcggaaaaaggaggatcggaagcagctaaaagtcagaagaattaatgcccagcccaaaacgtattggattaagcaggcacagcaagccgtcaacgccyttgtaagagcacgtgattcaagcctgccctgcgtatcatgtggtacccatttagcggcacagtgggatgctggacactacagaacaaccgcagcagcacctcaattcagattcgacccccggcaaatccataaacaatgttcagtatgcaatcagcacaagggcgggaatatcgttccgtaccgcgtcgagctgattaagcgcattggaattgagacagtggaggctatcgaaaacaaccacgaacgcagcagttacagcattgaagagctgaaaagcattcgagattactaccggctggaactgaaaaagctaaaacttctccaggaggcagcatgaacgtaactcaattaaagctcaccaaagaacagcatgattggattaatggctggcttgaactgtggggttcatgggtttactcggggagattagagaagcgcatgagcagcgttatagcgcagtacatggctacaatagagccgcagaaatatccagatagaccgatgtgtaatgacgatgacggaatgttgatttctcaggtcgtagattctgtcatgaacattgatacaaaggcctttgggatattactaagctattacgcgaacaattccactgaatacgcaattgcagtttatagccacaagagtgcaattcctcgcaaaatagtaactcgcggcgggaatagattaaaacgcccatcgctatcaacctgtcgccgagaggtgaaggaaattctggatgctagcgtctttatgatttaccaaccgcygctatctgccatgaacagccgcaaacgtgtagggaaaattaggaaggttgcataaaacgtgttgacacatttgagcaaatgagcaatgataagtaggtaaggtgccgtatctgtcttaaacgaacgcctacccaatttaaagccctgactctaaccggtcggggcttcttgcatttgcgtctatggttaagtggcataactactggcttccacccagtaagcgccagttcgattctggctagacgctccacatttcaggctgcgctattgcgtggccttttttatttagctcgccgccagtgccaatcaccctcaaaaacacaacgtgcctgaatgggccacggcggcgagctattccctacacaacagcacccgaccaaatgccggggaagattttccccaaacggggggtgggtcatgaaaatgttgaaatcaccggatgtatggatgctcatcattgcctggatagcagaccaccggggtgagttacttagcgcggcactggctgcgttgatggcttacttgcgtggctggtatgccggaggaggtaaaacgcaacgtatgcttgatgcggccatgtgctcagtgatggcatggtttatcaaagatgtattggttatagccgggctgaaccctgactggtcattaattgccagcgtgttcattgggtacatgggtacggattacattggttcggtgctaaagcgcatcgttggcaataagacaggggctgacaatgcaaatcagtagcaccggaatcaatctaataaaacaattcgaaggctgcaaattgacgacatatccagaccctggcaccggcggcgctccctggacaattggttacggctggactcatccagtagatggtaagcccgtggttcgcggcatgactatcgatcagcctaccgccgaccggttgctgaaatgcggagttgtccagttcgagcagggcgttaaccagatgctcaaaatcggcgtaacccagaatcaattcgacgccttggtatcgctggcctacaacatcggaacccgagcgctcagcacatcgacgctgatgaaaaaggtaaacgcgggtgatgcaaagggcgctgcggatgaattcctgaaatggaataaagcaggtgggaaagaaatgaaaggcctgactaatcgccgggcggctgagcgtgagcttttcctgtcatgagtcgcgtaacggcaatactcatcgctgtaacggtggctctgctattcggcctgatgtattaccacgggcaagtaaccaggctacagcgcgacgtctctgacattacccagatagccaacagcagacagtcagccattgacacgatgctaattcagcgccagcaggttgctgctatcgatatcaaatacaccaaggaactggcagatgccaaatctgagaacgagcgccttcgtgctgatatcgctactggtgctaagcggttgcagctcaacgccagctgtaagcgattgcccgaagccacagccacctccagcagcgttgatgatgccagcgccagacttactaacgccgctgaacgggattatctcagtctccgcgagcgaatcggaattgcaaccagccaaataaacggcttgcaggcgtatatcaataacgtttgtcttgcgaggtaagagaaggtggggacagcatccccgctgaattaatcacccaactttgcggtaagggtagccagcttttttgatatgcgcatcaaaatactgccccttagacggtgcgttcattaatgacgtgtgaatggaggccgggactctcgaatattgataaataccgcctcctagaaaagcaatttccaaagtggaacttgcactatcgtaaccaactgaatgaaggtttgaagatgaaacaggttgacgaatcaattgataaatctcctttaagtggcaaaagtgccaaagagatgatcgaacactttaagaaatataacttcgtggatgatcacggacacaggctagacatgtgcttggacttcacagatttgattgaaatggccgtttcgtaggcttgttaggcaaaaaaacacaaaaggctcgacttaggtcgggctttttttatgcagtaaatccagcgcatcgcagcgcaaatcactcagaacctttcaggatgacccttgaggaaccggctggctgtcggagccttctgagggccgtattcctgtgcgaacaaggttcatcactaaaaggtatatccgaatgaacattatccctcttagctataaaggcgaatcagtacgctttaacactgaaggttgggtaaacgtcactgacgttgctgagaaatttggtaagcgcatcgacaactggatgaggctagctgaaacgcttgaatacatccgggcgctggatgaggcaatgactggtgtggagtctgaaattctacatccctcgaaatgcaggtatgtaaaaaccagtaaggcgagaaaggatcgcggaggtggtacatggcttcatccaaagctatcggtcgcttttgcgcgttggtgcgatgctcggttcgctgtctggtgtgatttgcatatagatagcttgttgcgtggtgagctaacggagcagcaaaactatgaccaggcctgccgaattcgcgatgaccggaaatcaaaagcaagtggtggtgcacgagaaatggcacgttggcgctgggacaaacctgccctagaagcaaccgtggaattctggcaggagcaactgaagttaacgctcgatattgccagctaaaagaaaaactgagagccactttcacaacggctctccattaactaaaagcactcatatatcagataggcgatcccgaccaaagaggccatccctgtaaaggttagccccaatgccagggtggagtagctcactgttgcagccatgtaccaacttttaaatttagcccacatagtcatcatcctttttgttttgcaaaagaatgacagtcaaatcagagggatggaaattggttgtacagatcaataatcggctattgatcgtttaaaacgatcgttgaacaacgagacggagcaaatatggcaagaccggattggggagccattcaaggacagttcctcgccgaccatgccaaatcaaacatctcccctaaagattggtgcgaggcgcaagggcttaattactccactgcaaagcgctacatcaaaattgcgaatgctaatagtaaaagtgcgaatagaagtgcgaattcgcagaaaggaaaagacaccaaaagtaggcagccaaaggaatctggtagaaaccgcgaatcaaacaaagtcaagaattctccaggcgcgaaaccgatacgtggcgctcgatgttcccctccgaccaatccattccaaccaggcaatcagcatgcactaaagcatggcggctatgggcgtcgcatgttgctcactgacgaatcagcgaagatgctaattgcctgacgctagatgatgaattgttttggctacgtgctgccagtctgactgccgctgagaacattggtcgctggcgaactgagttagatgatgacgttgatgatgatactaagaaggcactacgtgacaacatcagcgccgccgagaaggctatgcatcgcaacactgcgcgcattgaatcgttggagtacacgaaaggcacaatcatcaagatgcagatcgatgctgcttaccgtgaagctgccactgaaaaggtggaactggaaatagacaaaatgaaggacggagatagcgataacgcgattgtcgttcataactcgctgccaatccctgggagataatatggccgacatatatctacctacgctacacgatgggcagttaaaggtttggtctgatgcttgggatcaccgccttaacgctatccgctgcgggcggcggtggggtaaaaccttcatgctcgccagcgctgctgttacgtatgctacagcgccatttaagcgccctggaatggatgtcgagttaggtgggcgcgtaggtatatttaccgccgaatatcgccaatatcaggaaatttacgacaagcttgaagaaactcttcagccgctgaaaaaaagctttagccgacaggaaaagcgcctactacttaagaacgctgggaagattgatttctgggttaccaacgataacaagctggctggtcgtgggcgtgagtacgatattgtgcttatcgatgaggctgcattcaccaaatcaccggaaatgctgaaggaaatatggaccaagtctataaagccgacgcttcttactacgaaaggccgtgcatttgtattctccacacctgacggcattgacgacgataattttttctacgccatttgcaacaataagaagcttggcttctttgagcatcacgcaccaacgtcatctaatccatttgttccacctgaagaactggagaaggaacgggagaataatgatccccgcgtattccgtcaggagttcttggctgaatttgttgactggtcatcatctgccctgtttgacataagcaagtggttcattgacgagaagcctgttgagtacccagccatgtgtcaggcggtctttgctgtcatggacacggcagttaagggcggcacagagcatgacggaacagcagtagtttactacgccattgaaactcgccccggcatggagcgactaacaatccttgattgggatgttgtgcaaatcgatggcgctttattagaggtttatctcccctccgtattcgaccgactaaatgaattaaccggccagtgcgtcgctgtaaacggcagccttgggttgttcatagaggacgccagtatgggcagtatcttgctgcaaaaaggcgacagcatgggttggcctgtcaaaaagatagagtcagcactaacaagcaaagggaaagatgagcgcgcaattatggcatccggttatcactaccgggggttagccaagatatcgcgtcatgccttcgagaaaactgctgtctttaaaggcgagacagctaaccatctatttaagcaagtatcccgattccatctcgcagataaaaacgcacataagcgcgctgatgacctgctcgatgactacatgtatgggctgatactggcattcggtagcggcgacgcactctgatgagataacaaaatgattgacgacgaaattgaaatcggcagcagctcaccagaactgtcactacttctggagggtgatgatatccagccaggaatgagcgccggatatcaaatctgtaagactatttacctctaccatccgctgggtgggaaaatggtagatcgcccaattaaaatggcgatgaacgaaccaagaacggtacatgtttcccaaacatttgcgcttgaacaacgcctacgagaagccttcgagcgcgagtggcggtcacttggtgctgaccgacacatttcaaatgctgcacggattgccagaatttacggtacatctgcgatagcgatgttggtagataaccaagagccgtcaatagcccttgatttccgcacgctgtacaagcacaacatcagttttaacattcttgacccgctaaacactgctggcagtattgttctcaaccaagaccctaacgctcaagacttccaaaaagttgatggcattcgagttgcggggaaggcatatcacaagtcccgttgtgtggtgatccagaatgaagcgccaatttacctcgcgtataacccagcagcgttcggtttcacaggtcgaagcgtctatcagcgcgccttgttcccgctaaagtcgtttattcagaccatgcgcaccgatgacatggttgcagtaaaaggcggattgcttgttacgaagattaaagggcctagctctgttgtaaacaacatgatgcagaagcttagtggtgttaagcgaatgatgctgaaacgcggacggaccggggaggtattacaggtcggtcacgaagatgcaatcgaatctattgaccttaacaacctcgacaagccactcgatacagtgagaaatcatattctggctaatatcgccgctgccgccgacatgccagcgatcatcttgaatagtgagacatttactcagggatttggcgagggcacagaggacgctaaagcggtagcagtttacattgatgatctgcgtgaatggcttgatgagttgtacaactatttcatccgcatttgtcagtaccgagcttggagtatcgaattcttccaatccctgcgtgcagacatgccagaaataaagaacacctacagtctgtatttcaccaagtggattaataactttgagtacacatggccctcatcgctgaaggagccagaaagcgagaaagttaaagttgatgaaatcaggtttaaagcaattattagtatgggggaattgctgcttcctcaactaaataaagacaatgaaaacagagcaacatttattgagtggatgcaatcaaacgctaacgcaaatgaacgcctcttccctaaccgacttgaccttgattttgacagcctgaaggataatccaccgattaaagagggggaagacccaaataaccctcaagttgattggaatttagtatgaacaatttcacgcgaattgtgcgagaggcggttaagtatttcctgaagaatggctactcatcaagcagtgagctggagcgctggcagtctcttattagaggggccgctgagggtgctactgctgatgattatgccggtatggtagccgaaagattaaggcattcattcgagcgccaagtaaccaacggtggtgctattaatcgtcatccaggaatagcgcgctttaccattcaccatcttgaaccacagcttagggcgcagttagatcgccgaattctcgccagtgttgacctcatcaaactgaacagaagcaaagctatcgacactacgttatctcggtttagcgggtgggccagcagtatccctccatctgcaagtatcgctctggtcggtaatcagggtggcatgctgaaaactgcacagcacatccaaaaaacagccgagcaaatggactatgaagcccggcgcgtgatgattgatcagaatcacaagctgattgccaacatcgacaatgttattgcaaccaacaacaacgctatcgctgttgagtggcacagccattggcgtcgccctggctataactatcgggttgaccacaaagagcgagataaagagttctatcttattcgcggtaattgggcgcaaaagaatggctatgtaaagcccggtaaagcgggatatctggatgaagttgaccagttcggagaaaagcctttctgctcatgttatggcgagtacatctacaacctccgcagcatccctgaagacatgcttacccagaagggtaaaaagtttatggagtcgatgggcggaaaataactaaccacccatgacgcgagaggttcaatgacccgtggctattttcgctagtggaatcctatttcgccaaggtaagcgagttttacttattcagcgctcagatgatgggacatggtgtccaccgggagggaagcttgaagaaggtgaaatagcatccgacgctgccagacgagaagtgatggaagaagttggctatcagtatacagggccaatgaccccctacagcagcaataacgattacctaacctatcgagctgacattgaagaacagttcgaaccacaaattgacgatgagtcactagccgctggctggttcgatatcgacgatatgccaaagccattgcataaaccatttgccgaaatgatggctcaacagccactcaatgaaacgcaagtggctgcgctaatagctgatggcaccctaagcagtccgcaattcttcatcaacatgtggatgtacgccattcgtgtaaccgggactggggtcacgtggcgtagtgctgacaaccaaatggcgttccgagacccggaaaactatttaacccccgattttcttcagcgtgtagccggtgtcccgttgatttggttgcaccctgagaaaaataagctcgatagcgatgaatttgcaaagcgggttattggaaccttaacgaatagttgggttgctgataatggggaggtgtgggcgatagcccgtgtttatgatgcagaggctgccgaaataatggcaacaaagcaattaagcacctcaccaaccgtcacgtttagtgaaccgcagaatgcagttatcaaagtcgacggtcagtctctattggtggaagactccccggtattgctcgaccatgttgcaatttgtgaacagggcgtatgggacaagctccttgaccctactggtgttaaatctgattccattccaaacgaggctgaaataatggacgaagacaaattcgtagaactattcaataagtgcatggattctcgcatggcgaaagccgactcagaggctaaagaaaaagccgatgctgaagagaatgcaaagaaagaaaaggctgatgctgaagcaaaagaggctgaagaggccaaggctaaagcagatgcagaagaaaaatccgcaaaagaaaaagctgacgagaccgagttgaaaaaacttgagaacgaagcaaaaggtgaagatgaccacctggagaaagagcgcaaagagcgtgagaaagcagactcagatttgcgcagtgaaatggcacttctaaaatctcgccttcctaccgagctatctgactcagaacgaaatgaattagctgatgcgcaagttaaggctgatagcgtgttctctgtgctgggtaagcgcgcacctatgccgctctctggtgagaaaccactgtcatatcgtcgtcgcctgatgatccagttacaggaacattcaagcgattacaaagcagttgatctctcttcaatcgctgactctgcattgttgaatatcgcagagaaacaaatttacgccgatgcacaatcctcagccagtttgagtgttgggcctggcatgttgcgtgaaattaaacgctccgatgttactggtcgtcagattagtaccttcgaaggcgatccggcagccacttggggaccattccaaatgggtaagcgtcaggtcaccatgttcaacaaccaggcttaacgggagcattaaagcatggctaatttatctctaaacccaatggcgacgactaacgcattgggttctttcggtgttcagtctgacggcttcattcaaggcgttgctttggatgacccggctaatcgtttcaatcttgcttccggcaccgtttctgcaactgagactaaacctctgtggggcggcgtgccggttgctgagctgatccctggcgtatcttccagccctcgcggttcgaccattcgtcgtgcgctaggcgtggctgatattgaagggtttacagttttcaatcaggcgcataatgggctgaccactccacaatcacctgttccactatttgcgtcaggcatgagtgtttccttctatcgctttggcgcgaacatgcgtatcccattgaaagcatcttctgcggtgatcgcgctcggtgccaacaatgcatctgtaaaaacagcattggcgtgggacttcgttaacaaccaaatcaccacagctgccgatgcgggttatgcaggtgctgatattgccaccaccgccatttcattcaccggtggtgtggctacggctactactggcgcggcgcatggattaactgctggtaagtacatcaccattagtggtgctgttcctgcggcttataacggcactgtagttgttacctcagcaccgacagctaccacgttcacttatgtgccagcgtcaacacctggtggcgcagcaactacacagggaactattggcgcggtaactctggcgaacattacgctgccggccaaagttatctcaatacagtctggcaactcaaaaaccgtctcttatgacagtgttacgggtttcctgacatggaatgatcacgacagctgcgcgctggtcctaatttaatcgggagttgaattaaatggctgcaattactccgagttacacgatcgtcaatccgtcgtacatcgcgccggaaatgatcattggctaccagcaggcgtcaggtgcatttgaaaccatcgccagcggtaacccacaggttcgcctgggtgttggcgatcagtatgtttacatgcgtcgtcttgatatccgcacccaggttacttccagtcaatccgggaacgctaaccagttgccgagtgttgcaatggaagcccgcatgatttccactccaacatatcttttccgttgccgtggtatctatgaccaccatgacatggcagcagcaggaaactggaatgtggcactgcctgaagcacagcgccttggtatgcgacagggtatcttccagcaacttcgtaccagcttactgtttggtatgaacccagcaggcggtgagggcttgctgaataccgcaggcgcgaccactgacactctgccagctgactcaagcggaaacaccacggtcctgacttacgaccatggggaaatggcggtttatcttctggggcaagttcaggcagcgcttacacgaaccatgcaattgggtcgccagcagcgcgttgtaattcttggtcctcagcgtgtgctgggtgccatggagattcagcagattgttcaattgacatcatatcagcgccctggtggtggtactgatgcagttggcgggatggtgaaggaagttctgagaggtgccggagttcaggttgattgggtttacgacgatacattgatcggcgctggcgctggcggtacagacgttgtgttaattactatccctgaagttgaagttccgatggttaactcaaccattaacaccaacgaatttgccaaactttcaccttctctggctgcaaatgccctgatgttctgtgacatggctgcacctcgcgaaattcctactccgatcgccggtggcgcagtagacgtgttagcagaaatgcgttcaacatctggctgggccgttcgtccggaagctatcactatcttatctatggcctacagcgcttaagtctgcgcgttgtcataagaacccctgctggttaaatccttcaggggttttttattttgggggaaacgatgaagctttatatcgcaaacactactaagcagcgccacatgttctctttccgtaccttagagacgggtcgcttgcgcaacattcctattgcttatggctctcaagccattgttcttgatggtggcgctgaagaaatcgatgcagttatccagcatcaccaagtttacgggctgatagatgcttcaactattgaccaaagtaaaaactttgttggcctttgctacagcattgataagccggtgcaagagaagatcatcgaaaaagcgatgagagataacgaccataagttgactgaaacctctcataaccgccgtcaagcgtcagtcgcagctcaagacgatgcattgctgaatagcggtaccggttatggcggtgacatggagttcactgtcgagcagacaaagggccgtgatgacaataacgacacgcctagcgtgaatgaaacaattgtcacccagaagcgcgggagtaaaaagtaaatgaccatcagtctgtcgggatttatcgagtttattcgcactgacatggagattaccgctactcaggttcccgacgactcgccttcaattgctcttgcttacggtggcgctgttgagtgggtgaatcaggatattgcctctgtgatgccgaatctctatacggtggcggtatataaccttgctgcttcattcctggttaactacgggacggaatcagtattttctgagcttcgtaaaacgcttgggctgaataacttcaaggctggggtgatcaccggagccagcgataactcaacaagttctcagcgcctggtgcctgatttcttcaaggacttgtcattagctgaccttcagatgctacttgacccttgggggcgcaggtacctgatgattgctcagcaattcgggagtttgtgggggctatcatgatcactctccatctcggtgttatggacatcccttatggtgatgagaacacaaccactggcgacgtagcagagctgctagagggtaagtacaaaatcatgcagacgttctttgaccggtacggtaaagatatcgctgacatgatggctaatgatattgctgccagtcttgagaatatgattgtaggtgcgccacctacaagagatccgttagctgaatcaatgtcacgaacgcacaacctatttgtcgcgtttttggataatgaagagatgaatgggttagcgggaattccaactcgcagggcaatggaagggatatcgaagagattcaaaaataagaagggtagcccaagaccatcctttatcgataccggaacatatcaggcgtctatgcgcgcctgggtaagcggggtgctgaatgccttccctagctgagctacagaaaactgcacaaacagaacttaatgcggccttgactcagggcctcgatgacataagcctttccgaggtcgtcacatttacaaaatatatcaggaaggttctccctctggatggctttgtgttctgggtaaaagcgtcaattctcactgacgaaccagatcctgagccagatacggtggatgtgaaaggttacctgcacttaacaactgaaaccatccaagatgatgagcaactttacgaccgaaacgtagtgacattcaccgctcagtcggatatcgaccaatttaatgacatcggttctgatgtgctctacatcggtgagttttacggaatacagttctcgttctctcggcgaaccggcctgaatgaaccagctaatctatatcactacactggcgaagctgtatatccgcatatgcgatcgcagattatcaactctgctgaagatatagatttaactgatgtggttgtctctagctccctgccgatctggttggggttgaatcagtacatgccaatgtatccagccatgttatcaatccagaatctttcgccaccatttgcgacagtcaggtgtagtaacgccgctcctattgccggggcgttctatctggatgagaagtacaaccaataccagcttgtttcggaagatgtgaccatttcagtaaccggattgcgtaatgccgcaatagaggactttctttgctacatgcagcaatacacgataagtgatgacgctgaaatgggaattatgaacattcctgtcgttcaagatgagcgcgtgacgcagaacgaacttaacgttactgccatgcgtaaaaccatcaaattcaagatcaactattaccagcaacggatgaggaatgtcgcccgtaagttggttatttctgtaatcccgtccatttatccggagaaataattaaatggcaattgttaatattaacgtatcggtgaccaatccaccgaagccgtcgcaactgcttaagtccggggcgatgatttccatgggcgggaccacgctgaatccaggcgagtaccagttactgacatctaaatcagatttgacaaccatcctaaaaccagcaaaagcgattgctaccattgaatgggctacaaacgtagtgacagtaacgctttcggccgctcatggatggacaattggcgatcaggttcctgtattagtttcaggcgttacccctactggatataacggtgcatttactgccacggtaaccacatcaactgcgttcacctatccattatcagttagccctggcgtatccacggttatgggatcggtaaaaactgtagtagcgaatgaaattacccagatgaatacttcatattgggcgcagggaactaaccgagcagtatttgtgctcgagcttggtgatgtatccatggtgaatggtgttgcggctctatcgacatttattgatgaagatatttcactggggaatacataccagaaattcttctcttatctggttccgcgcgagtgggatgagcagacaacatttaaaaccctaactgggcaatatacatcgccaagttcgttggtttatttctttgttactaccactattggcacttattccgagtgggttactacgaagaataagacagtatttgcaggtgttgaggccccaaatattccggcaacggagttttctatggctggcccattccaatcttcactatcgaatgaccccggttcatcaaacatggtcccgccgatggcatatcggttcatgtatggggtaacagaatatccagtgagtggtaatggcacactgctgaaaacccttcaagataacagcattaactacatcggcactgcggcagaaggtgggcttagcaataagatgctggttgctggccatatgctggacagtaatccattcaactattggtattcagttgcatggacggcgataaaccttgaactggatcttgctaacgaagtcattaacggctctaacacctcaaccaaccctctttactatgagcaagttggtatcgaccgtctccaaaatcgcgcgttgaaaacactacgcaatggcattagttatgggttaatcctggggcgagtcattggaaccaagcttattcaaactgactttaatgctgaatatgaaaaaggcagctatgcgggcaatgctgtgattaatgccgtgccattcagtaattacacaagcctgaatccttccgattatcagggcggtaaatataacgggctaagcgctgttatgacacctcgtcgtggattcgagtcaatcacgtttaacctgaacgtaaccaattttgtaggggcataaaaaaatggcaaacccgttagtatcacagggatttcttaaccgtgttcgtggcgcggtttccgtaactggcgatccgtctctgaatgttacagcatcatttcttggcaaagagggggttagtttgcgtcctgatgggccagcaaccgacatcttacccacgatgactggcacggtaggcagccaggcaccataccagcaggttacgttaacagttcacttacttaaaactcagtcgcttgctgctgcatatcaaaatcgctttgcgaccgatacgtcactcggggaaattgtagttaccccggatgctaatacctttgggaattacaccgttcttaatagttatttagttaacttcaatgaaataactatgaacggcatggatcctggctatgtggctacaatttctggctacatcattaccaacgataatatgtgggtgtaatccgtgaaaattgacaaaaatcttaacctggttagcaccatcatccgagatgggggtaatcctgtttatattcatgttaccccgttcccttatgaggttatcgaagagaactgtttgctgttggggaacatgttttcaaactttatttctcaagttggtgggctcggttccgctcgcattgccgccatgatgctacggaaaaaactcaagcaggagcaagagttgagtggatcttctggacctacaattgttgacgatattcaacgcttaaccactgtcatttataacgacaacggcgagtggaagtcatcaccttttgatgccgcgatgaagaataacgttatcaccgcagatgaatatcgagacactgaaggtgaaatagttttttttatggtgtcatctgccattcagaagaaggaactgatagccccaacagtgggggcggtgatcagtatgtacggtgggcaactaacatcatccaacgctatggaattccgcgcttccttgctgaagtcgaatcaggctaccgatacccaaccccagagtgccgagcaggaaacttcatttataccctcttagattgggctgcgaatgaggggttctggcgtgttatccgggaaatcactggggaagaattcttcagtcctgctcaatatcgccagcgcttcttaatcgcggcactcaaagaaaggggctttttcaatggcagctaagtcaatcattgatattgatgtaaatgacgataagttccagtcatttatggagaagttcaacgagtatcaagctgcccttggtgacctcccagaagcatggagaggtgtcgctcatggcattggtgatacagagaaagaaactgcgaaggtgcgatcagagttgcagggtgtagcaaaatcattctccgatggcgctgctgctattctgtcgataaatagcggacttgaccggttaaacgatagccttgataaagccaataaaaaccaatctggatttaacaagaatgcgagtgctgcaaagaaattcctgagtggtgctacgaaagatgcgaaatcgctggccggtcatatcaaggatgcaaccacaagtttaatttcatggactagcatccttggtttgttttctgggctgatcggcgctggcgggctattcgggattaatcgactggcctccggtgccgcatcacagagatttacaacacttgggttaggaaccacgtctggtggccttgactctaccgctatcaactatcagagagcactaagtaacccaacaggtacccttggtgctattcgagactcacagcttgacctgagcaagcgctggcagttccaggcgatgggtatcaacaatccagatcaggaccctgcaaaactgcttccacagatgatccgcaatgcgcgcgatatctttgttaaaaatggcagcaatcttcaaggggccgaggcccacggactgacaaactttttcaccctcgatgatctgaaccgctttaaaaatatgagcgatgcagaaattgattcgatggaaaaaagggccgctcaggacagcaaacaactacaactaagcgatcagattcaaaagcagtggactgattttaatgtccagttgcaacgtagtggttacagcatagaaaactcatttattcgtggtcttgcccctttggctccacagttaaccaggttgtctgattctgtttccgggatgattgattcatttcttaaatcaccagaactggggaaatggattgatggactctcacaaggaatccagaagtttggagaatacctagcatcaccatcatttcgaactgatatcgatagcttcatgaagtcaatccgagatatgggtctgactgtcgataatgtgattcgttttttaaatgggacaacactgaacggatggaatgattcagtagctgatagcgctaactcatcggctaagtgggttaaagagaaaactggttttgatccgcaaactgttggaccggcaattaaagatttattcagcattgggtctaaaaaaataaaagattggtattccggcggaagcattactccagttgacccaactcctgccgatgtcaccgccaagggccgaacaatagccgatcgctttaacaaccccggtaatttgcgctgggctgaaggttacgggactcataacactcaaagtggaaagtttgctgtatttccaacccttgatgagggggttctggcagccacgaagcagcttcagatatatggctctaaagggataaataacgttaaggatatcgttagcaaatgggccccatccaatgaaaacgatacagccgcttatattcgccatgttgttaaatcgacaaagttcagtgaaaacgaaaagctaaaccttaatgatccagccgttctggcaaaactaatttcagctatggcaacgaaagagggggccggaagcagggttactgagggggccgtcatccagatttataacaataccggtggcaatgccattgtaaatagcgctcagcttggagggtatggataatggctttcacgcgggagctttacaagcttggttttgaaatatcccctgtaattctgtgtgagggtgtagctcaaagcatcccaggagggatgctgccgatagtggctcttacacaaagcgcaagttttgttacgggactcatcggcggggctataaacctgacagacttggataagtatttctgccattggaagcccattcagggggcaactatggttgattacgatattgcccgatacccattcgctaaccaaacagtggctgcaaacgcgctattagcacaaccactccgagtatctctaatgatggatgcgccggttaatgagaacactggcgcaatgacaaaattagtgaccctaagtgcacttcagtcagttctgcaagctcatgccaaccttggtggcacattcattgttgcaacacctgcattgatatacagcggttgcatactgaaaacagtgaaagacgttaccagctataacgaagcgatcacgcaaaaatcgtgggtatgggatttcgagcagccacttgttactgagactggagccgagcaagccgttaatagctttatcggcaagatagacggtggagcaaagacaaccagtagcgcgtggacaagtacggctgcggcattaggaaatacctctcttggtggaagcgtctcaggcatagcaagtgaggttgtagggcttgttggaaaactgagtggagctttcggcttatgagtacagaatattatgatttttctggcaatgagcgggagagcatgtcgtttactccgtcgctggatgggacgatttataactgccaaataaaatggaatatatcggctcagagatggtatctgaacattacggataactcaggtaaccagatccttaccaccgcaatgatcgaatcaacaaccggtatggggattaaccttatatcgggagttttttcttcaacatccatgatatggcgtcagcctaatggtcgaattgaggtaacaagctgatgcgcttttacgatattcaaatatatgaccagaagggagctttatttcgtcagtattcaagccttaagaatggagttttcaatcctggcgggctgatggttgaatttgacattcaacgatttggagagtcaaccccacaagggcaaagctgcatcactgtttggggagttagcccacaggaaatgcagcaagcccagcaaaacatgtttggcatgactgtaaaaatgtttgttggaatgtcaaagggattgccgttatcgaagccatctcaaaaaggcttggttcttgaggggaccatctggcaagcatttggaaactggcagggaaccgagttacggcttgatttaatcgttgttgctggacccacatcgaccaccagtcagttacctatggctccgcttaatttaacgatgccatggggggtgggacagcagttatcggtagctttaactcaatgctttcagactcttggtggttcatacactcacaatataaacgttagtaaccgcttggtgcttccatattcaaggcccatgttctgtggggctcttagccagttagctagcgatctgaaaaacttctcaaagacaataattaaagattcatcttattctggtgttgaaattaccatcgttaatggaaaagagataagggtatgggataacgattatattaatcattcagataaaacatcattaaaaagtgccacctaccggaatggtcatccaactcaaatagaattcactgatcttataggtcagcccacctggattagatttggcacaataacagtgccatgtgtaatgcgagccgatattcaggttggtgaccatattttaatgccgaaaaaatcacgggcaatgattcaagcatcttcattttctcaattcagaaatgactctgcttttactggtgagtttatcgtgcaatccgttcgccttgtaggtaacagccggcaacccgatgcaaatagttgggtgaccatcattgaggcatatccttctacggagttggcgaaaaaatgaatgttagcaataagttgaattttaatagaaatattactcagtttgctgaaaacaaaataagcgaagcaatggagtcggctggtaaggtattgccagtaactgttatttctcagtcagggaaaatggtaactgtttcattcaatctcactaatatcccgtacacgctacctcaagtcactattcctatctttgggcctcaatatattcgctacccaatgcaatcaggggataaagggatcgtgatccctgctgacacctatcttggcggagtgagtgggcaagggggagggacggcagaccttacgcctcctgcgaacttaagtgccttggtttttttacccatcagcaataccgagtgggattcggttgatgggcaggtcctgacgctatacggaccagagggggtgactattcgggatggcggaagcaatacaacatttttgcttacgccggaaagtatcactattgccacgcctacacagtttaaagtcacagttggcagtacggtgctaactttgacaaacggcatgtggagcctttctggagaagctggaaagttagaagatgctaccgcaagtacaagtcctgcaattatgcatgagggctgggccggattggttgcatggtgtaatagccacgttcataccaacggtaatggcgggtcaaataccggttcaactacaacgccttttaacgggaatattactgaatgagaacttacggcagaaattcagagggccaatgggtgcttgttgaaactgatgataatggttttaatgattctgtttatctgacgacgcttattcaaaacctgaagctggccccgcaagaatcacccttttacgcgaataacggcatcccggctaatggctcggtcattcagcagatattgccgacttattacgtcaatagaatacagcaacaatttagccaatatttctcttctttgcagattgccatggtcagtgatgacccgccaatttataacatatcggctataacgaacgccggttcaaaaatcattgcacaggtgaatgtatgagtgatttgccagttagttacaatgcatcaggccctatcccactaaccgcaaatgaattaagagataaaatagtctccctcgccactgcgcaatcacctggaattacaactgatttgcccggatctttggtagaggatattgttagtaccagcgttggcgcacttctcgtttgtgatcaagccagagttgatttaattaactcagttggaccactaacggctaatatttttatgcttaatactctcgctgaacaatatgggataactgggcaaaaaacagaggggctgacaactgttcagattatttttagtggcccggcaggatttgccctccctcagggttttttggtttcagatggcacgcatcaatattcattatctgatacaaccataattcctgcgtcaggaacaacatcaccagttacttgtgcggcaacaatcacagggacatgggcagtaccagagaataccgtaaacaatatagccacaagcctgccatcagatatcgttattacttgtacaaatcaaaccgcagggatacccggtggaccaaccgaaaccgttgcagagttcagggggcgagtatgggaatcaggaatgagcacagtccaggggtatcctggctttattcgtcaaaaattaactgatttagataatgttcaggctaggcttgtctctgtcgtggccgatggtagcgattggataatcatgtgcggcgggggtgacattttttcaatggcaggggctatttacaagtcagcaggcgatattagccgattaaaaggcacttcactaaatgttacaggaataaccaatgcttctcctggagttattaccaccgatataactcatggatttagtagtgggcaggtcgctattattaatggagttacggggatttcagggatcaatggcacgcctttcaccattactgttataaattcccactcgttctctattggtgttagcacgacgggttccggggcatggactggcggcggggtggtaactccaaatttaagaaataacactgtaacaataaatgactggcctgatagctacgttataccttttgttcaacctttacagcagcgcgtaactgtaaaattagagtgggcaactgaaagtgtcaattatctaactgacgccacggtatcttccctagtggctgctccagtcatttcttatattaacggtatttatgctggtaatccgttaaatattaatagtataaaagatgtttttttgcagtccataaatgaaactctaaatatgagcttgattagcaatctcaatgtgattgttactgtaaatggcgttattactagcgtggatgaaaatacaaatataattagcggtgacagatacagctattggtttatttcagatgatggcgtgaccgttactggggggtgagatgcttgatgatattattcgtgcatatttatatcaacagtataatgatgatgaaaatcttcaggcttttgttgacgcatataacacgctgtcaaaagacatatattcatggatgaaagatgcgaatctccctgtttttgttggcggctataacgcaggcgatcagctcaggtggattgctttgggggtgtatggggttaggccacctatactggttagtgacaagcgccgcacgtttggtgattacaattcgcttttgtttaaccaattgccttttaatggacggatggttaaggatgaatctgagcaagtagttgcttcagacgatgtgttcaaaagagtaatgacatggaattactataaaggtgatggtttcaactttaccataccgtggctaaagcgccgggttatgaggtttttgaccggggtcgatggagtagatgttgttaatgatcagcggtggagtatttcggtgctgttttccacatcaggcgctaacatttcgattgttaaagggtatagaaagcttacaaactcgggggtatataattcattccccataaatactcgctcttttaatcagaacacaagcgtcctgattaaaagtaacgaatatgagtttgcatcactattcaagcaggctttcgatagtggacttttacatatgccattttatcagcctgtttctgtgaccattgttggttgaatggtatagaatttatcctctttcatagggttttagggatgatgatgaataagttatgttttttgttaattgtgtcaatttttctttcaggctgcgccgaaccacctctatcacagaagcgtgattttcttatcaaaatggctccttcaatttacaacccaatgggggcgagtattcctgtaaatattaatacagtccgaggagaaatgattgccaatggttgggagactgatgacttcttaaagagattatctgataaatgctatgatctttcatatgcagcttcaggttcatgcgcccttgatttttattacgatgagctaaaagaaaaaaaagaagaaaaagaagatggactgtgtagtaaaaacccagtttgcatcagagatagagagactaaatcggcaatacatgatttaaatcatatatattatcttgtcatggcaagaaaccaatatgaccaagctgaatttgatttgaatattagagcattatgcaaagccgctggcgttggacaaagggggggaattccattaaggcagattgaagaagatgtaaaccagcaacctggattgtctcctgaggtaagagggcagttcagggacattgctatgtcttgctggactctaagcaaaaacggtattacggatggaacaacacaaattaagaatgtgtattaataaatggcccaatttacgtaggccttttctttctggcgcgtcattgcgctgagcagcccactcaggtgggctttttattatgtttttcttcaataatttcagagaccttttttagtgactctgcaaacattgacgccatgtttttaagattactgccttgctgatcaagcatctcactctgcattctgatcacattccttagctccctagcatctcctgccgggaagcctgatttctccgcttcgattgcatcatcaagtatttgtactatctcggcgttcagtgatctgccgtttctttttgctctttcagtaagctcgcacttaagttcttgtgtcatgcgcaagttgaactgtggatcgtttctggccatgcatcctccgataaatagagttgacatactattacggtggtattatcttatcaataagaccacggtggtcttaagaaggaagctaaaatgaaagacgcacgtaagttgcctgtatttaatatacgaatgccaaaaagcgatatggatcttgtgaaaatggcggcagaaagaaatggacgctccattaactcagagatttatcagagattgatgaatagcctgaaaagcgagggatttgctagtgtgcagtgaaaacaacgaaacccggcagtgcgtcaacactagccgggcttctaatttgtcaaatactttcggagttatcgacatgtcaagtatagcaactcagatctctactatcaacgttcctttccatggtcaatctttggctacaattttccatgatggtcagccttttgtcgctatgcgcccaatcattgagaacattgggatagattggaccgggcagcttgtaaagctcaaaaatcagaaggaaaaatttgggtgtagagatatctctactcctacaaaaggtggcattcagaagatgatctgcattccattgcgcaagctcaacggctggttgttcagtatcaaccctgaaaaggttcgtgccgatatcaaagacaagctcattcagtatcaggaagagtgtttcagcgttctatatgaatattggtctaagggtgaggtaaagccgaaagtcagcaaaactacagtcaatgagcgcactccgcttcgtgacgcagtaaacatgttggtcggcaagaaaggactccgctatgacgatgcatacaatatggttcatcagcgttttaacattgatagcattgacgagcttgagcttaatcaaattccgctggctgtagaatatatccatcgtgtggttcttgatggtgaataccttggcaaacaggaagcggtgccagccactgttaagcaagtacagttcactaatgatgaactgtgcgcattatcttggttgtggcttgttgctgataaaatgcgtcgacacgcggaagaaacgtacccagcacttaaacagcttgaatcgaaatacgctggcgatgcctgcgatattgctcgtgagttcaaatattggctagggaataccgaatcaattctttccagagaaactcggcatattgctaaaccatctggacgcgagggttgctactcgtctttagcttacttgagagagaatcactggaacccactacctcgttaaaaacccagattgttgaactaaacctaacccgcttatgcgggttttttattatcttaatatcaggagagccaaatggccttgacactcttaacatccaataacgcatcgacagtattggcgtccggcatcagcgcgaccgcaacgacacttactgttaataccggcaccgggataatctttccgtcacctagcccggggtctagttacttcaagcttactttagttgatgccgctacagggacattaacagaaatagttcatgttacctctcgttcgggagatgtcatgacgatagttcgcgctcaggagggtaccccagcaaggttgtggtctgctaatgacattgcagccaatatgttgacggcaggcacaattgcgcaactggctcaaaaagatttatcactacaaacagccaataacttatctgaaatagcaactgctggtcccgcagctgtggctgctgctgtagctaaccttggcttaacagaggccgctgccgccgctgctgatgctctgaagaaaagcgccaacctttctgacttggcgagcaagccagcatcaaggaccaatcttggtcttggcaactcatccacaagggatgtggcgcttgtatccgactatccgatcggcacagcagacaaggttgttactcttccagggctggtatcctatgcgctagctcaatcaaaaaacttgtcggatgtgactaacgcggctaccgctaggaataacttaggcctcggaaattcttcaacattagatgtggggagtgcggctaataccgtggccgccggcaatgacacgcgcattactggagcccttcaaaagacgcaaaatctgaatgacctttcggacaaaccccagtccagggttaacttaggattgggtaattcatccacacgtgacgtagcaacctcggcagaaatccccgtcggtacggcagataaggttctcacgttgccggggctaatgattctttttggaaaaataaacttcactggtaatagtttcatcaggataccagaccgtccgggcgggttaattatccagtggggcaaggcaacaggcctagctactggaacatcattctccacggtcacctttccaactgcattccccaattataccggttcagtcattaccactcgaaattatagtgctgccgccactggtgctcaggcaaaccaaaccgtgaggaacgtcaccagcacaacatttgaggttaatgcggctgatactgtggttgtggatttattctgggttgcttttggctactaaataacgaggttgtgatgtcatatttatttaataaaaagacaagccggtttttggcaaaaaatatggtcgatgatggtagctacggtgaaattaaagactcagacttaatcatccccactgacgatgagatgactatatatcacgccactgccgcaccacaaagaaaactattggggacggtaaagggcaggccagcctgggtcgatgcaccagagatgacgccagaggaagttctagttgaggcaactagtcagagatcggcgctaaaggccaaagctgatagtgaaattgaatggcgtcaggatgcggttgacagcggttcgcctgaagggacggaagcaaatgatttggcaaaatggaaggagtatcgaatctctttaatgagattggatatatcgactggtaaaagcatagagtggccagcaatgccggattagaattttttattggcagggacgccgaggtgggagtgtgacagatttgtgccaaaacaatgacacaaaatggcgcaaatcagcaaagcacgacaaacaccacttaagctggctggcttgtgtagcggcttagacagttgctatcatgcgttccttttaatcacgcgtcagactgtttatctgatgctggaggttctgtgaagtacgaattacaaaaaaccgatgggcgtgctcgtcgtggccgtttggtctttgagcgcggcgtagtggaaaccccggcttttatgcccgtgggcacctacggcaccgttaaaggcatgacgccggaagaagtgaaagaaaccggcgcgcaaatcctgctgggcaatactttccacctgtggctgcgtcctgggcaggaaatcatgaagctgcacggcgatttgcatgattttatgcaatggcacgggccgattctgaccgactccggcggtttccaggtattcagcctaggcgcaatgcggaaaatcaaagaggagggggtgcatttcaaaaacccgatcaacggcgattccgtgttccttagcccagaaaaatcgatggaaattcaatacgatttaggttcagacatcgtcatgatttttgacgaatgtacgccttatccagccgattgggattatgccaagcgttcaatggaaatgtcattgcgttgggcagcccgcagtcgtcaacgctttgatgagctgaataataaaaatgccttatttggtattattcagggcggcgtttacgaagatttacgtgatgtatcggtaaaaggactggtagatatcggctttgatggttacgctgtgggcggcctggcggtaggtgagccaaaagaagatatgcaccggattcttgagcacgtttgcccacagattccagcggataaaccacgctatttaatgggcgtcggcaagccggaagatttggttgaaggtgtacgccgcggtattgatatgtttgactgcgtgatgccaacgcgaaatgcccgtaacggacatctgtttgttaccgatggcgtggtgaaaatccgtaacgccaagcataaagatgatacgtcgaccctggatgctgaatgtgattgctacacttgtcgcaattatagtcgcgcctacttgcatcatctggatcgttgcaacgaaatactgggtgccagactcaataccattcataatctgcgttattatcaacgcttgatggcgggtttacgtcaggctattgaagacggtaaattagagagcttcgttgaagatttctatggtcggatcgggaaacctgttccaccattaaacgtttgatttagaaattattaacttgtaattatagattgaacggttaggattttgcggttactaattttaacacactgatgtcacactactgatattgataacaatgagggaattttaatgagtcttttcatttctgatgctgtcgcatctgcaggggctccggctcaaggaagcccgtactccctggtaattatgctggtggtctttggtctgatcttctacttcatgatcctgcgcccacagcaaaaacgttctaaagaacataaaaagctgatggactctatcggtaagggtgacgaagttttgaccactggcggtttgatcggtcgtgttactaaagttgcggaaactggctatatcgttatcgcactgaatgacaccactgaagtaatgatcaagcgtgacttcgtggctgccgttttgccgaaaggtacaatgaaggctctgtaattttcgattttccctaagggaactaccgtgttgaaccgttatcctttgtggaagtacgtcatgctgatcgtcgtgattctcgtcggtctgttgtatgcgcttcccaacctttatggtgaggatccggctgttcaaatcactggcgcgcgaggtatcgccgccagtgaaacaacgctggaccaagtccgtactgtcttggaaaaagacaacatagcgagcaagtctattgccctggaaaacggtgcaattctggctcgctttaaagatcctgatgttcagctgcgtgcccgtgaggcattaatgacagcgctgggcgacaaatacgtgattgcgctgaacctggcaccggcaacaccgagctggctggccagactgggcgctgagccgatgaagctgggccttgacctgcgtggcggtgtgcacttcctgatggaggtggatatggacacggcgttaggcaagctgcaagagcagacaatggataccctgcgcagcgatttgcgtgaaaaaggtattccttacgctgcggtgcgtaaactcgataattacggcgttgaagtgcgttttcgcgatgacaaagcccgcgatgaagccattagctatctttcttcccgtcaccgtgatttagtcatcaactctaacggcagcaatacattaaaagccgtgatgagtgacgatcgcctgcgtgaagctcgggaatatgctgttcagcaaaacattacgattctgcgtaaccgtgttaaccaattaggtgtggctgagccattggttcagcgtcagggtgccgatcgtattgtggttgaattgccggggattcaggatactgcccgtgccaaagagattcttggtgccacggcaacgctggaattccgtttggttaataccaacgttgatggttctgttgccgcctctggccgtgtgccgggcgattcagaagtgaaaaatacccgtgaaggacgcccggttgtattgtacaagcgcgttatcctgaccggcgaccatatcactgactctacttccagtaccgacgaatacaatcaggctcaggtgaatatttcacttgatagcgccggtggctctaccatgtccaatttcaccaaagacaacatcggcaagccgatggcaactttgtttgtggaatataaagacagcggtaagaaagatgccaacggtcgcgccattctggttaaacaagaagaagttatcaacgtcgcgaccattcagtctcgccttggtaacagcttccgtattaccggtattgataacccgaacgaagctcgccaactgtctctgttgctgcgtgccggtgccttgattgcgccaatccagattgtggaagagcgaactatcggcccaactttgggttcacaaaatattgcccagggtctggaagcctgcctgtggggtctggcggtatctatcctgttcatggtggtttactaccgtaaatttggtgtgattgctagtaccgcgctgctcgccaacctggtgttaatcgtcggcgtgatgtctctgctaccgggggcgacattaaccatgccgggtattgctggtatcgtgttaacccttgcggttgcggttgatgctaacgtactgattaacgagcgtattaaagaagagtttaaaaacgggcggtcgattcagcaggcgatacacgaagggtacaaaggtgctttctccagtatcatcgatgcgaacgtcacgacgttgatcacagcgattattctgtatgctgtgggtaccggttcgattaaaggctttgctattacgacagcaatcggcgttattacgtcaatgttcaccgcaatagtgggtactcgtgccatcgtcaacctgctttacggcggcaagcgcgttaacaagctgtctatttaaggagtacgttgtggcacaggattatactgttgagcaactgaactatggccgtaaagtctatgactttatgcgctgggacaacgtggcctttggcatttcgttgttgctgttagtggcatccattgcggttatttctgtaaaggggtttaactggggattggatttcaccggtggtacggtgattgaaatcaacctggaaaaaccagcagatcttgatcaaatgcgtgacactttggaaaaagcgggctttgagtcgccaattctgcagaacttcggtagtacccgtgatgtgatggtacgtatgccgcctgcgactggtactgcgggtcaggaattaggtaaccgtgttatttcggttatcaatgaatctgttgataagaatgcaacggtaaaacgcatcgaattcgtcggaccaagcgtgggcagtgatttggctcaggctggcgggatggcgcttctggtggctttgctgtctatcctggtttacgtcggcttccgttttgaatggcgactggcgctgggggcggttatcgctctggcccatgatgtggtcatcactatgggaattctgtcgttgttccagatagagattgacctgaccatcattgcttcattaatgtcggttattggttactcactgaacgatagcatcgtggtatcggaccgtattcgtgagaacttccgtaagattcgtcgcggaacgccttacgaaatcatgaacgtgtccctgacccagacgttgagccgtactattatgacctcggcaactaccctgatggtggtactgatgctgttcatcttcggtggtgcgatgctgcaaggcttctcactgaccatgttgatcggtgtatctatcggtactgtctcatccatttatgtcgcctctgcattggcgctgaaattgggtatgaaacgcgagcatatgctacagcagaaagttgagaaagaaggggctgaccagccttctattcttccttaaccaaaggcgttagagttaatctttgggttaactccggcgtaataaaaagccccgagaatcgtggactgtagtccaaaatttcggggctttttgcttttaaaccacagtgaaagacggtagcactggttcctgacatctggaactcgtgaagctggccaagttgaggctgagcgggggctggtctgagcactggcgttttagtggctagaaacctttattgagcaggaagtaaagactcgcttaccgcgtctctttcggcatcagcggcgttaaccacctgatgaaaacgaatataacctagctgttccggtgtgagaccgctcagtcgcaactcaatggtgtgttcggtttttggcaaaagagaagcgctaatagcgacgggctgtgacaaaacgtccgcagttaatggctggcctgtcgttggatccaattgtccccactcaacgttggcgctcatggctgggagcggttggtctgtcaggctacggatatgcagcaatgcctgagatccattcgcttcactggagatatcggtcagtgaaaccccaagtttgccgacgctgctgttcaacaccgcaggcgtattggcagccggcaacaggtaaacgccgttaagcgagcggcggttcagcgtgttttgctgctctacggctaatgcttgattggtcagggtttgcagtttttggcttagctggccaacctgatttttcagcgcgggaatctctggatcctgcgcacaaccggccagtactatcactgcggccaataaacaaattcgaggataactggttgtcatcataatgatttccttttcagtatatctatcatctagcttagccccgataaatgggaaagtcattgccaggtcgaggtcttacacataatttcaccaataactgcgcaacgctacgcaacaaatgggcttgagcctttgttgtcgtggcacttcgcggtaaactgtaggcaaatttgggaacaattatcaggaactgctatgcattgcccattttgtgccgccgttgataccaaagtgattgactcccgtctggtgggtgatggctcacaggttcgccgtcgccgccagtgtctggactgtaatgagcgctttaccacttttgaggtcgccgagttggtgttgcctcgcgtgatcaaaagtgatgatgttcgcgaacctttcaacgaggataagctgcgacgcgggatgttgaaagcgttggaaaaacgccccgttagctcggacgacgttgaaatggccattagccatattaaatcccaactgcgggccaccggcgaacgtgaagtgccaaccaaaatggtgggtaatctggtgatggaagcgttgaaaaaactggataaagtcgcctatatccgcttcgcatcggtttatcgtagctttgaagatattcgtgagtttggcgaagaaattgccagattgcaggactgattctttcagagtgggttctttccgtagaatttaaggattagcatgcattccgaccagatttatatggcccgagcttttgaactggcgcgtttagggcgatttacgacttcgccaaaccctaacgttggctgtgtgatcgttcgggatggtcagatcgtcggagaaggttaccattttcgtgccggtgaacctcatgcggaagtacatgcgttacgcatggcaggagacgccgctaaaggtgcgaccgcttatgttacgctagaaccttgcagccatcacgggcgcacgcctccctgcgcggatgcgcttgtcgctgcggggattcggcgggttgttaccgcgatgcaagatccgaatcctcaggtcgcagggcgcggaatgtataggctcaaacaggcgggtatcgaagtcgtggatggggtgatgctggccgaagccgaggcggttaaccttggtttcctgaagcgtatgcgtaccggatttccttatgttcaattgaaaatgggggcgtcgctggacggtaaaaccgccatggcatccggggaaagtcagtggattacttctccgcaggccagacaagacgttcagcgttttcgagcccaaagttcggcgattcttagcaccagcgcaacggtgctggctgacgatccttcgctgaccgtacgttggtcggaactggatgcagaaacccaacgaatttacccgcaatcggcgctacgacagccaactcgtattattctggatagccagaatcgcgttgctccaactcatcaggtggtgcagcaggagggaaactgctggctggcaagagtcaaggccgatcagcagccgtggccggatagcgtcgagcaggtattgctcccacatcacggtaacggcatcgatttggtcttgctgatgatgctacttggcaaacgccaaattaactcggtctgggtggaagccgggccacagctggccggcgcattattgcaggctggcttggtcgacgaacttatcctctatgtcgcgcccaaattactcggtgatagcgcccgtggtttatgccatttgcccggaatggatcaactttcccaggcccccgagttcagctttagtgaagtgcggcagataggccctgatttacgattacgcctaaaaccgaggtattaaccccaatttatggtaggagattttcctaccggtggccgtcttgtcgggcgttttacaaatgcgcaggcgcaggcagcgaaagaatatgatagaatccgcccccctgcggggtatgaaccgatattgaggaaagctatgaacgttatcgaaggtgttgttgctactcctactgcccgcgtggcgattgcgattgcgcgttttaacaactttatcaatgacagtctgctggaaggcgcaattgatgccctgaagcgcattggtcaggtctccgacgacaacattaccgttgtttgggtgccgggtgcctatgagttgccgttggctgttaatgtgttggcaaaaactaatcgttatgacgcggttatcgctctgggtactgtgatccgtgggggcactgcgcactttgagtttgttgctggtgaagcaagttctggcttggcaagcgttgccatgaacagcgatatccctgtggctttcggtgttttaaccactgaaagcattgagcaggctattgagcgcgctggtactaaagcgggtaataaaggtgcagaagctgccctgaccgcacttgaaatgattaatgtaatcaaagctattaaaggctgaatttagttaagttaaggggaattctgtgaaacctgctgctcgtcgccgcgctcgtgagtgcgctgttcaagcgatctactcatggcagttgtctaaaaacgacatcgctgatgttgaattacagttcctgtcggagcaggatgtcaaagatgtagacatctcctattttcgcgagttgctgtccggcgttgcggtgaatgtaaccgcgctggatgctgcaatggcgccgtatctgtcacgccaactcgaagaattaggtcaggttgaaaaagcgattctgcgtcttgcgatttttgaactgagcaaacgtgatgatgtcccttataaagtggcaatcaatgaagcgatcgaactggccaaaattttcggcgctgaagatagccataaattcgttaacggcgtgctggacaaagttgctccagtcgtgcgtaaacgaaaataatcgcattacatcaacgatataaattaaggccggtttccggccttaatttatatatcggctaacctttctggaattgtattatggcatgtggcgaatttgacctcattgctcgctactttgaccggttcaggagtaaccgccgggacgtggagttgggcattggcgatgactgtgcgctactaacagtcggtgaacgacaactgttagcggtcagcacagacaccttagtgtcaggcgtccatttcttaccggatattgacccggcagacttgggctacaaggctttagcggtaaacctcagtgatttggcagcgatgggcgcggacccagcctggctttctttagcacttaccctccctgatgtgaacgaatcctggctacaggcattcagtgacagtctgtttgatcaactcaattactatggcatgcagcttatcggcggtgataccaccagtgggccgttaagtatgacgctgactattcaagggcttattcctgcgggcagggcgttgacccgatccggtgccagaattggcgactggatttatgtcagtggcaccttgggtgatagcgcggctggcttagccattctgcaaaatcagctgcgggttgaagatgcgaaggatcgggctgaactgatcaatcgtcatctgcggccacagccacgggttctgcaagggcaggcattgcgggatttggctaattcagccatcgatatttccgatgggttgatttccgatctacagcatattttgaaagccagcaactgcggtgcacgtatcgagctggacgccctaccttattcagatgcgatgaaaaatcaggttgatcctgagcaagcgctgatttgggcactcagcggcggtgaagattacgaactgtgctttaccgtccctgaaatcaatcgtggggcgttagatgtggcgctcagccacgccggagcgggctatacttgtattggtcagatagctcctttatccgaaggggtgaagttctttagcgatggcaaacctgttgacgtcggtttgcgcggtttcgatcactttaccagccaaggctaaccatggatgaggcgaagaaacgtctgcgattaaccaatccttggcatctgctggcgactggttttggtagcggtttatcgccgtgggcaccgggcactatggggtcgattgccgccattccattttggttgctgttgatccaattgccttggcaactttactctctggtcgtgatgtttagcatttgcattggcgtttatatttgccatcgaaccgctaaagatatgaaagttcacgatcacggcagtatcgtctgggatgagtttgtcggaatgtggatcacgttgatggcattaccggtgaatgactggcagtgggtgctggcggggtttgtcgttttccgtattctggatatctggaaaccttggccaatccgttggtttgaccgaaatcttcatggcggtatgggtattatggtcgacgatatcattgctggcgtgggggcagcggcagtgatttattttatcgggcaccaatggcctttagcgctttttggctaataccagaacaactcatagcatggcaagtcactaaaaaatttagctttctttccgtggtgtgggttaggtttatctgatgagaatatgctaaatagaaaagggcatagcgtttaagctgtgcccttttgcgtgatatcagccccaattatgggtaatggccgattaagctagccagtcttcaattgtcttctgaatacccgctgcgcttaaaccaaattcggcgcgcatttcatcctgctcaccttgcggaataaagcgatcgggtaaaccgatattgagtaccggaacttgctggcgttttgccattaacagctcgttaataccactgccagcgccacccatgattgcattctcttccagcgtaaccagtaaatcgtgacgggctgccatttctaataccagctcttcatctaacggcttgataaagcgcatatccactaatgtagcattcagattttctgccacctgctgcgcttcagaaagcaatgtaccgaagctcagaattgcgactttttcaccctgacgacgcacaatacctttgccgataggaagagcctgtaatggctctaaaactgcgccagtaccattcccgcgagggtagcgtaccgccgctggaccgtcgtagtggtagccggtaaataacatctgacggcattcattttcattgcttggcgccatgatgaccatattaggaatgcagcgcataaatgatagatcgaaagcgccctgatgggtttgtccatcagcgccgacgataccgccgcgatcgatagcgaagagtaccggtaaattaggaatagccacatcgtgaatcagctgatcgtaagctcgctgcaagaaagtcgagtagatcgctacaaccggtttatagccaccaatcgccagaccggcagcgaaggtcaccgcgtgttgttctgctatggccacatcgaagtactgctgcgggaattcacgggagaaccgcaccataccagagccttcgcgcatagcaggggtaacggccatcagttggctgtctttttcagccgtttcacacagccaatcgccgaatattttggaataggtgggtaaatcgcttttgctttttggcaaagtacctagcgcaggatcgaacttaggtaccgcatgccagccgataggatctttctccgctggtgcgtagcctttgccctttttggtcataatatgcagaagttgcggccctttgaggctacgcatatttttcagcgtttgggttaaagcttgtacgtcgtggccatcaaccgggccgatataattaaagccgagctcttcaaacagcgtacccggaaccaccatacctttcagatgttcttcagtacgtttgagtagttctttaatcggcggcaggccggagaaggctctttttcctccttcgcgcagcgtggaatacagttttccggataataattgggccaaatgattattcagcgcgccgacgttttcagagatcgacatctcattgtcgttgagcacgaccagcatatccggattgatatcaccggcgtggttcatggcttcaaacgccatacctgcggtaatcgcgccatcgccaatcacacagacggtacggcggcctttaccctcacgttcggcggccacggccatacctaagccggcactgatagacgtggatgaatgcccgacggataacacgtcatattcgctttcatcacgccaagggaaaggatgtaaaccctctttttgacgaatggtggcaatacgatcgcgtcgaccggttagaatcttatgaggatacgcctgatgaccgacatcccacaccagatggtcgaacggcgtgttatagacatagtgcaaggccacggtcagctcaaccgttcccaaccctgacgcaaagtggccgctagaacggctaacagagtcgagtaaatactgtcgcagctcatcgcatagcttgggcaggctttcttttggcagtaaacgcagttcctcggggttctccgcaagtgccagtgtcgggtatttggctatatcaagactcattcgatgctcatatcagaggtgtttacgtaggctgctgcattaccattcccggcagggcagtgccgggatcagaaatcgtctgaacaccggtgcgctggcggcagaatattattctgcacgagtaacgcctactggattaattgtttctaattatcgcgttcaattataaaactcgctagcgcccgcagtgaggcggtgtcatacgacagttcagccaaagcatccagcgcttcgagataaagatctctggctttggtttgggcagcttccagacccagtagggccggataggtgcttttgcctaactgttggtctgaaccctggcgtttgcctattgtagcggtatcaccgataacgtctaaaatatcgtcctgaacctgaaaggcgaggccaatggcatcggcgtagcgatctaactgttccaaagcccgatggccgggttttcccgcagccaatgcgcccatgcgcaccgcggtacggatcagcgcgccggttttatgacgatgaatttgctccagctccgtcagtgaaatatggcgctcttctgctgccagatccaatgcctgtccgccacacattccggctacgccgctggattttgccagttcggacagcatgctgacgcgatcctgcatggcgacgtccggcattggcgcatcggctaaaatgctaaatgccagcgtttgcagggcatcgccggctaaaatcgcgcaggcttcgccaaatttgatatgacaagttggctgaccacggcgcagatcgtcattgtccatcgccggcaaatcgtcatgtatcaaagaataggcgtgtatacattctaccgctgccgctggcgcatccagcgtcgagagcgacaaaccgaacatttggccggtggcgtacaccagataggggcgcagtcgtttaccgcccaacaacgtgccataacgcattgcttgcactagctcgctgtcgttaaacggcagcggtgcaataaaactcagtaatgcatcattagctcgttgttgatatatcgccaactgctctgtaaaaacaacgggttggttcatttcgttctgatgggacatgtttattcggtatccggcgtaaaaggcgtcagcggcgcatcggtgtcatcactgagcaatatctgaacccgttgttctgcctgcaacagcgtttgctggccttgacgagccaactgtatgccgcgttcgaattcgttaagcgcatcttccaacggcagttcacctgactccaggcgggtcacaatttgctccagctcgctgagtgaagtctcaaaactggcgctactttttacggtagcctctggcttatccgtagcttctggtgatgcagcttttctaggcatattttattttcaacgttaagttggcgtcatggggccggtgggccactctcggttttgggctattgtaacgaattatgccgagcaaatcgtggcgtttgcttcgggttttattaagcagatatccactatatggtgatatactccgcgccttgaatattattggtaaggcagacagcccggagttagccttaacgataacatcgtccatttactcagtgactcgctatttaccgctgcgtcgtccggtcattttgactcaacagtattgttctttcgatagcaacctaattcactcatcatactagacaactaaagaccgccatgaagtttatcattaaattgttcccagaaatcaccatcaagagtcaaactgtgcgtttgcgcttcattaagattcttactaccaatattcgcaacgtgttgaaacaccttgatgactcgctggcggtggttcgtcactgggatcatattgaagtgcgtaccaaagatgaaaatcttggccccgcgatctgtgacgctttaacccgaattcccggtattcaccatattttggaagtggaagaccgtagttacaccgatctacacgatattttcgagcaaacgctggaagcttatcgtgacacgctggtgggcaagaccttctgcgtgcgggtaaaacgccgtggtaagcacgagttcagttccggcgaagcagagcgctacgtcggcggcggtctgaatcagcatattgagacggctaaagtgaaactgactgcgcctcaggtcacggtcaatctggaaatcgatcaagataaactggtgctgatcaaagctcgtcacgaaggtttgggcggtttccctattggtacgcaggaagatgttttatcactgatttctggcggttttgattccggcgtgtccagctatatgttgatgcgccgcggctgtcgggtgcattactgcttcttcaatcttggcggttcagctcatgaaattggcgtaaaacaggtggctcattatctgtggaaccgcttcggtagctctcacaaagttcgttttgtggcgatcgattttgaacctgtggttggggaaatcctggagaaagtcgaagacggtcagatgggcgtagtgctgaagcgcatgatggtgcgagcggcttctcaggtcgcggagcgctatggcgtgcaggcgttggtaaccggtgaggcgctggggcaggtttccagccagacgttgaccaacctgcggttgatcgataacgcatctgacacgctgattctgcgcccgctgatttcccatgataaagaacacattatcaatttggcgcgcgagatcggtaccgaagactttgccaaaaccatgccggaatactgtggtgtgatttctaaaagcccaacggttaaagcggtgaaagctaaaattgaggaagaagagtcgcactttgatttctcaattctcgatcgtgtagtgagcgaagcgaaaaacgtggatatccgcactatcgccgagcaaagccgcgaacaggtggctgaagtagaaaccgtagcagaactggctgataccgatgtggtgctggatattcgcgcgccggatgagcaggaagagaagccgttggttttggctccggtagaagtacggaccttgcctttctataagttaagcactcagtttggcgatctggatcagagcaaaacctatttgctgtactgtgagcgtggcgtgatgagccgtttgcaggcgctatatctgcgtgagcagggctacaagaacgtaaaagtttatcgtccataactgagacggtatctgattctgaaagggcgctaatgcgccctttgttatttccgaaagctaatagcgatagtcttttttatcgatgccgtatttcttcatccgtagatagagctttttgcgcggtacttgcaaatactctgctacgtcgttaattcttccctgatggatatttagcgcctcattaattatcttcagctcatactgttcaattcgttcatccaacgggccacagtcagtttcagtcacccattccatgctggtttcggtcaatggcgtcacgccaacggcaaataattctgccgcgtttaataactctcgaatatttcccggccacggacggcgacacaacctttttacgaaagcctcactcagctgtggctgctggcgatccagacgtttacaggcattttccagataatggcggaatagtacctcaatatcgccagggcgctttgccaagggtaaacactcaatatggctaagagaaaatcgatagtagagttcgggaaccagcaattgctgagcggccaactgtgcaggtaaggagttgctcaaagcaattaaacggaaatgacattcttcagggttttgcagttgcgccaaagcacgctgttgctggctggcgagccgttcaatgttttttactaccaatgtaccgttctgtacctgattgatgtaactattgaggtcgatattctcatcgctggtaggatcgatgatgatcaacggattattgcggcgttggctcagttggtgcagatagcgtgccgccagagagcggccggttcccagctcaccgtaaaaaaataccggcacatcaatatcggccagcatctgcaggcgttctcttagttgccgaacccaaccgctgttgcccaacagatgttcgctaagctgctcccgctgccagtgacgacgagcaatcagagcctgtctatctgccagcgccagctgaacgcattgcagtaatttttccggattgactggtttttccagaaagttataggcaccttttttcaccgcctccaccgccatgggaacatcgccgtggccggagatcagcaatatcggcagatgacgatctttggcgagcaaaatttccagcagagccatgccggaaaggtttggcatacagacatcgctgatgaccataccctgccaatcggtggtaataagttctgctgccgcctgcggtgagctgtatgccgctacctgataaccttcttgcgtcaggatctggcaataggcgtccagcacatcaatatcgtcatcaatcagtaaaatttgctgttcatcagttaacatggctcagactcctgaattgcaatatcaccattccgtggtggtctaatgttgacgccaaccgcagctctcctgcgcactgctccataatggactggctaatcgatagaccgatacccagtcccacttctttgctggtcgtaaaaggtttaagcaatcgatccgccagcgctagcggccagccctgaccattatctcgcagagtcagcaatagattttctgcctgttgttcgaaagaaacctcaatgattggcggatgttgagcgctggcttctagcgcgttggtcaataagttgaccaacacttgctgaatacgaatatcgtcgccgtataccaaagggaaactttctggctggatgaaccgcgccttgagtggacgatgacgcaaggataaaagatcccaggccgcatccagattggctcgtagatcgatggggtgtaactgttgatgtgcatcgctgcgacgggagaattgtcgtagctgcttaataatattcacaatacgcagaatcaaaccgcgcattttatccagattggcctccagcatggcgttatcgccgtttttaagcgctttttcactgctgaataaatacagcgacagggcattgagaggctgatttacctcatgagcaagggtggtcatcgtctgcccgactaccgccagtttagccgcctgaatcagttcatcttgcgcagtacgtaaatccttctcaatgagccgtctttcatcaatctcttgtttaagctgatttttttgctgattaatctggccgatggtgcggcgcagtaatccagcaattcgccccagttcgtcccctccgtagaccggaatagttgtatccagttcgccgcagcctaaacgcgctaccgattgatttaacagggtaaagcgtttgatcaagcgtgagcgaatatagaaatgattgagcgtaaaggcaaacagcagagccaggagggttgcgacaataatcagcaggccgctgatgcccataatatcgccgaggcgttgattgaaggtttgtaactgctggtggctgttgcccaactggttttcaatctgactgcgaaagcgagtgagggtttgctctttcgcattcacggtttcctccagcaatgccagcgccgttgcccgttcttgcaaaatagccggcatttttagctctgcggtgcctaaattgagcaattcatcgatagtctggcgcagagtgatggtgctgggatgttttgccaacgattgcatgttggattccgcagtttgctttaggtagctcaggtaacgaatgtgattattcaggctatcaatattcggattggccagttgttcgcgcagatcgtcaaccacctgagtttcaatgtgcgcaagggcgtaaaccagctgtaattcatcctgaacattgcgcagcgtactttgcaactggtgatttttttccagactggttttctgcgttaattgatcgatgagcgagccttgctgccagctaatatcctgagaaagcgacgttagctcggtattgaaatcatcgtgaagccagttaatccgtgctgcgagctcggtgatcttttctctggcgaggaaattactgtatagcgcactatccaatcgagaaagcagttcccgacttcgggtcaacgtcgttgccaactggcgctggctgtccggtgtcagacgtcggctggccatttcgatggtatccagccgatgagcaatctgatcgcgcatttgaatacgcgccgttgtgttgggggcatgctggaattcattcaattcctgaatgagtgcattcagattttcttccagctgaaaggacgcctgaattttaggaaagtaatcatccagcgcatagcgaatctggctactttgggcgtgccatgaatacaaactgacggcgctgacaaacagagtcagtattgcaccaaaggcaaatgcccagcgcaaaatagagctgatagtgatgcgatagaaaagcgggttcatttcagcgattccaactgttggatcgccaaatgctgctgtttttggaagaactgttgccaaatcattagctctgactccattgcgttatccggcccctggttaaagcgttgcagataatccatatccacagcctgctgcggagtgacgggtacggcggtcagcaatgcccggatttccggcagagggcgttttagacgagcttcggcgctgtgcaaagctttccacgcatcctgtagctggtgcaggcggaaagtgatcgcggtatcaaacaattgctgcacgagtttctgccgttgcaggatctggcgataatccagcggcgtttgctgtaataagcgctgttgctgtttggcgcgcggatcttcaacgggtaacggggaaactggatacttgccggtatcggtatctgaaagtgctttttgcccgctgtcactcagtagaaaattgatgaaacgggcggcgtcggtttggcgcgagctgcctttcgtcatggcgataaaagtcggtgaagcgccgctttcaggaaagtaactgaaactgagctgcgggtcttttagcaacagagtggcgtaattatcgataatggggccggcaaggccgagtccggttttgattttattggaaacgccaaaactgcgggaagaaattgtggccagattaccggaaatttccagcagggtttcccagccttgctgccagccccgttgctgtagcaatgtttctatcatcaaatggttagtgtcggagcgagaagggctgctcattaaaatcatcccttgatagcgggcgtcttttaatccgtcccaggtgaccggcgtgggtaaatgcttttcttttaagcgtgcgctattggccagaatgccatagccggaaatggctaccgccgccgtggagctgcggatggattctggaacgcgttgctgattatgtactgccagcgtaggcaaggtagccaaacgctgatgatcctgcaaatgctgcatcaacatcggggatgaggtcagcaccaaatcgatattttcccccattggcgtatccagtaaacgctctagggaagagctagtgcgatttagcgttcgaatagaaactgcctgcggctgtttatgccattgcgcaatgatatgcgcggtagcttcgggggagaaggtggtggcaataaccaattcattagcgtaactcgcgggagctaaactcagggcaataattaggttcaagagaatgttgcgtaaactttgcatctatttattcgccccggttaatgtgtgattaatatcaaataaataacaaataaatatatttatagcgatggccggattgttccaatttgtcccatttttgtcttttttaacgcgtaaaaataaagaaagacaaaaatgagttaattttgactcataaattttgggttgttgtgtcaattttgaaacatatcccttaggttgcaccaattcgtcagtcgctgcatgctgactgcgaaacataatgacgcagtggcgctgggattatcaactgctttgtagtatcagacactttattttattcagacaatgtctgcgataacagacttattggcttcaacgccagggaaatccatttttctaaataacaatttaataataaatctttaaggtgaactatgctctcatttatgaaacccaagatagcaacccataaagttcccgacgataaagtaatagctacatataatcgttatcgggttcaggcgttgttcagtatatttattggttacctttcctactatattgtgcggaataacttcacgctttctacaccttatttaaaagaacaattgcacttaagcgccacggaaattggcatgctaagtagctgtatgttaattgcctacggtattagtaaaggcatcatgagtagtttggcggataaggccaatcccaaagtttatatggcaatgggtttgctactgtgcgccttggtcaatgtaggattggggtttagcggcgcattctggctgtttgccgtattagtcatctttaacggtttcttccagggaatgggagtcgggccttcctttattactatcgccaactggttcccgcgtcgtgagcgtggccgggtgggggctatctggaatatttcccataatgtaggcggcggcgtggtcgcacctatcgtcggcggcgcattcgcaattttaggcagtgagcactggcaaaccgctagctatatcgtgcctgccattattgcggtgattttggggtcaatggtattgctgttgggcaaaggttctccggttagtgaaggcttacctccgttacaggaaatcatgccggaagccttggtgattgagccagttaaagccgggcagaaagcaccggaaaatatgtctgcattccagattttctgtacttatgtactgaaaaacaagcatgcctggtacgtgtctttcgtagatgttttcgtttatatggtgcgtttcggtatgatcagttggctaccgatttatctgttgactgaaaaacacttcaccaagggcgaaatgagcgtggctttcctgttctttgaatgggcggcaatcccttctacgttattggccggttggttatcggataaattcttccgcggccgtagaatgccgttggcgatgatttgtatggtgatgatctttatctgcctgatcggttactggcagtgtgattccctactgatggtgactttctttgcggctatcgtcggttgtctgatttatgtgcctcagttcctggcttcagtgcagaccatggaaatcgtaccgagcttcgccgtagggtcagcggtgggcttacgcggctttatgagctatatccttggagccagtttgggtaccagcctgtttggcgtaatggtcgatagagtgggttggcacggcgggttctacttgctgatgggggggattatttgctgcattatcttctgctatctgtcccatcgcggcgtgctggaactggagcgggaacgcaaagatcagcaggtacgtttagataaagaagcattagcttaatcttagggttaaaacagccgttcagcgtcgaacggctgcgatatgaatcagttacggtaattaaagatgcccggcggcagaataagctgacgggcgacttcctcagctttttcccttcccaataataaaaagatgatttttaatgcaaagtcgatagaggttgccggcccttggctcgtaaccagattgactctacgatcgtagaccactcgctgatccatccatttattcggtgaaattttatctttcaagccgggataaccggtcatattcccgatggggaataggttatggtgttctaacaccaaagccggtgccgcgcaaatggctgcgaccagatggccttcattatgagtttgccgcactttttcgaccagcagcgggctatcacggaaacattctgccccttttattccgccgggtaataccactacgtcaaattgttgatcggccacatcgaccagacgcgtatctgccaccagttttacaccgcgagagcaagtaattactaactctccatcaccggctacgcttgcggtcgtcacttcaaagccgccacgtaccagcacatcaatggtggtgaccgcttcggtttcttcactcccaggtgccaggcaaaccagtgccgatacgctcatacacattttcctttcgtttaatcgaatcgtacaggcgtgaattttccggcagcgtcatgccgtgactgcgcgcccgacgtagtaaatagccggtgatatagtcgatctctgtatgtctctgcgcacgtaaatcctgaagcatggaggagacgttatcagccgtactttgaatcacttcctgcacataataaagcaggctttcggtggaggtatggaaaccttccatttccattacatcggcaatttctgcgcataatcgcgttaccagctcaggataacgctgtaggtcaccgtttcggcactcatacaggccggtaagaggattgataacgcagttgaccgccagcttatgccagcaggcggaggaaatatcattgtgccatgcgacgtccggcagggcgtggtgcagtatatccgccagataactgacatctttgccgggggcaatcgcggggccaatatgagatatgccgccggcaacgtggataatggtattgccgtcaggtcgcgctgcatgagtcgttacgccgtgcaggaaagtatttaccgcgtccggtaactcttcctgcgtacccattccgttatgcaagagcaaaaccgtgcaatccggattgagtttaggcagtagggtggttaccgcgctggaaacttgccaagctttcaaacataccagcagtaactcgctttctgctaaatgctgcggatcgttggtgggcagattttgattgaattcgtcaccttcaagggtgatgacattcaccgaacagtagggttgaggcactcgcaaccaaccctgaacatcatggccttgttggtacagagccgataaccaaagctgcccgagcgcaccgcaaccaagaaccgtaatcttcataactctctccctggtgtaaacggaaaacgcgctaaatatttataagtgttatgcttggattatagactttttcttcattaaacgctgagttagctacgttctgtggcgaaaatgcgaacagccagcggcttgattttgtctacgacgataaagcggttattatgcttgccattcatcttatatggaggagggaatatgccatctttcgacatcgtttctgaaattgatatgcaggaagtgcgtaacgcagtagaaaacgccacccgcgatctggcaaaccgttgggattttcgtaacgtcccagctagttttgaattaaatgagaaaaacgaaagtattaaagttgccagcgaatctgattttcaggtggagcagttgctcgatattctacgggcgcaactgagcaaacgtggcatcgaaggtgcggcgctggagattccggaagaaatggatcgcagcggcaaaacctacagcgtggatgccaagctgaagcagggcattgaaagcgcgcaggccaagaagctggttaagttgatcaaagacagcaagctgaaagtgcaggcgcagattcagggtgaacaggttcgcgtaaccggtaaagcgcgtgacgatctgcaaagcgtaatggcactggttcgcggtgcagatttggggcaaccgttccagttcaataacttccgcgactaagctcaaagtctgattgctgataacagtaataaaggctgctgattgataaagaggaacaaatgcccatttacagcttttgttcctcatctcatcatcgatgcttcttacacagcgttaaccagttgttctaactgatatcggttcgttttcttgatatctactttcacataagcgctgcgttctgccgctacgactatcgcttcggtcacgcctggctgcgctttaattttatgttccaaggccgaatctttagccgctaattcggacagcgtgatgcgtaagctactgacataaggaggttcctgcatcgttgcgctaacggcaaaccacaccaaagcaatgaccgaaccggcgataaacaccactcccgcaccgtcgagcccgaataaccaaccgcccaaactgccgccaatggctacgccgataaactggctggtagagtaaattcccatcgccgtacctttgtagccagcgggagactccttgctaatcaacgaaggcaaaattgcctccatcacattgaaggcaataaagaagagttgcacaccagcgataatgccccacaggtgttcaccggatgcccacatcactacttcggcgatcagcaatacggccacacagcccataaacacctgtttcatccggcgtttgacttcggcataaataataaatggtactaccgccgcgaaggaaaccagcattgtcaccagataaaccttccaatgctgttcgggcagtaagcccgctttggccatggcctgaggcagggcgacaaagctcgacatcaacagaatatgcaggcacataatgccgaaattaagttttagcaaccggctgtttttcaatactttattgacgctgccttttactatgctggattcgcgatttaatacatgggtatccgcagaaggcaccactgccaacgtgataacgatgcccagtaacgccagtaccgctatgccccaaaatagtgcattcaggccataggcgtgggtgacgattgggccgagtaccatagcaatagcgaaagtaataccgaagctaacgccaataaatgccatggctttagtacgattttgttcgcgagtcagatccgaaagcaaagccatcactgcggcggcaatagcaccagaaccttgtaatgccctgccgaggataatgccccaaatagaatcgctcatggcagcaatcacgctacccagcgcaaaaatcagtaacccgccaacgatcagaggtttacgcccaatacggtcggatattaatccgaaaggaatctggaatattgcctgagccagaccgtagataccgatagcaataccgatcagtgcttcactggctccggccaaagccatgccataggtggtgatcaccggcagcaccatgaacatcccgagcatgcgcagtgaaaaaaccgttcccagcccccaggttgcccggagctctaacggagtcattttgttatcgttcattaccacctcaaaaaaacttattgcactattgtaatgattttagtgccaaccggtaaatctattgatgtttagaatatattacagccagagtgggtatcttccggaaaaatagagtttatcagacggttgataggtgtattcaaaacgagaggaatatacagtctgatggcaaaatcaggtatgaataaaacagggtagggtagaaaagaggaagcgaccggctggaaaccagcgaggccgcttcatggaactttcggtgtgcttacccgacgtaagtcagtaatgcagcagatgacggaacgttgaagtctacagacatcattacactcaatgaagtaatcgcaatgattgagaatacgaagagttttctcgcccatacgctgtcattcgttgctttgtagccacgcagagccattcccaaccaccagacgctgactgccgctgcgactaccagatatttatatccggcgtagccgctgagagtcagcatcagtgttgctaccataaatgccagaatatacagggtgatatggtttttggtgaccgatatcccttttataactggcaataccggaatattcgccgcttggtaatctttaaagcggaatatggcgatcgcgtaggaatgcggcatctgccagatgctgaagatcaataacaggatcaatgcgccggtatcaaactggcctgtcaccgcgcagtagccgataaccggcggagccgcaccggacaagctgcctatcaaagtgccgtataccgacttacgcttcatgtagaggctgtaaaccccgacatagataatgaaacctatgacggccagtgccattgctaacacattggccgccacataaagcaacagcatgcccgcaatacccagtaccgatgcataaatcagggttatcttcggttcgataaggccttttaccaaggcccggttcttcgttctctccatgatgcagtcgatatcacggtcgatatagttgttaaatacacacccggaggcaacaactaacgaaacaccgattagcgtggcgagaaaaagggggtaatcaatatcgcctttagaggcgaggaggaatcccccaacgacagaaattaaattgccgaaaataattcctggtttagttacttgcaggtattgcttaatcatcacatgcagctctttagtcaaccatcatattgatgttgaggttgtacataatccacagcgagcccacaacaacgatcgcgataatcattacggtgaacaggaacgccaccaggttccagcgctcttctgacttaccattcatatgcaggaagtacaccaggtgtacgataatctgcaccacggcaagggtcacaaccgttgccagaatcatggtatgagaagcggtgccctgcataaccatgacaaacggaatgactgtcagaattactgacagaacgaagccgattatataggacttcaggctgccgtggcttgctccaccgtgaccagtagttgaatgactcatttacatggctcctaacagataaacaacggtgaatacgcagatccacaccacgtccaggaagtgccagaacagactcaggcacatcaggcgcgtttgattggtagggttcaggccgcgtttcgctacctgaatcatcataatgataatccaaaccaaaccagttgttacgtgaataccgtgagtggcaaccaacgcaaagaagctagacaggaacgcactgcgatccgggccgtagccttcagcgatcaggtgatggaattcatagatttccatcgccacgaagcccaggccgaacaggaaggtcatacccaaccagagatttacctgatttttgttgcctttgttcatacccagcatggccatgccataggtaatactactaaacaggagcaggaaggtttcgaccaaaacgaagttcaggtcaaaaatgtccttacctgtagggccgccagcggtcccgtttaccaatactgcataggttgcgaacaaagtcgcaaacagaatacagtcgctcatcaggtagacccagaagccaaagaccttggtggctcccgcatcgtggtgcccatgctctgcatgggctacgttgtggttagtcagagtttcagttgacatgattcacgcctgcttttctgatttgttcatggtgaagattttcaatgcgctcaacttcttctgccggcacatagtaatccacatcttcgtcgaagcttttcacgatccaggtgacgatcatgccaacgaagccggcgatagccatccaccagatgtgccagaccatggcgaagccaaagatcagactgaaagctgcaatgatgacacccgcgccggtattcttcggcatgtggatctcttcatatttagccggacgcttgtaagcttcgcctttctctttcatgtcccagaattcatcacggtcaacaacttcaggcactacggcgaagttatagaacggaggtggggaagaggtagaccattccagcgtacgtgcatcccacgggtcaccggtcagatcgcggttttgttcacggtcacgcacactgacgaagacctgaataacctgacacagaataccgcaggcaatcagtactgcaccgcctgctgccaccatcaacatcgggtggaattcagggttaatatcctggcttaaacgacgggtcatacccataaagcccagaacgtacagcggcataaaggctacgaagaaaccgataatccagaaccagaacgcacgtttgccccaggtttcattcagcgtgaagccgaaagatttagggaaccagtaagtcagacctgcgaagcaaccgaatactacgccgccgatgatcacgttatggaagtgagcaatcaggaacagactgttatgcagtacgaagttcgcacccggtacggctaacagaacgccggtcatcccaccgatggagaaggtgatgataaagccaacggtccacagcatcgcagagttgaactggatacggccttgatacatggtgaacagccagttgaagattttcaccccggtcgggatggaaataatcatggtagcaataccgaagaaggcgtttacgttggcacctgaacccatggtaaagaaatggtgcagccaaacgataaacgacagaacggtaatggcaatggttgcccatactaatgaggtataaccgaacagacgtttcttcgagaaggtcgccgtgacttcggagaacacaccgaataccggcagaaccaggatatacacttccggatggccccaagcccaaatcaggttaatgtacatcatcatgttgccgcccatatcattggtaaagaaatgggtgcccatgtaacgatcaagagtcagtaacgcaacggttacggtcaaaatcgggaaagaaacgataatcaagatgttggtacagaaagccgcccaggtgaagacaggcatcttcatcatggacatgccaggagcacgcatcttaagaatagtcgcgaagaagttaacaccggtcaacaaggtacccagacctgaaatctgtagactccatatccagtaatcgacgccaacgcccggattgtactcaatgcctgacagcggcggatacgccaaccagccagtctgagcaaattcaccgactcccagagagatgttgatcaacaccaccccgacgacgaagaaccagaaacttagggagttcaggaacgggaaggcaacgtcgcgagcaccaatttgcaatggtacgacgatgttcatcagacccaccacgaaaggcatcgccatgaagaagatcatgattacgccgtgggcggtaaatatctggtcatagtgatgaggtggcaggaatcctgcctcgccagccgaagcaagcgcttgctggcttcgcatcatgatggcatcggcaaagccacgcaacagcatgaccatcgctaccagaatgtacatgataccgattttcttatggtcaacggaggtcaaccattcgctccacaaccatttccatttgccgaaataagtcagggcggcaactaatgccagaccgcctagaataattgcagcaacggtaaccattatgattggttcgtgtaacggaaccgcatcaagtgttaattttcccaacatcgtttattcctcggctccggcgtgagagtggtcgcccatttccatgcctttgctcatgtccatgcctttatgcatgtcatcgctcttgtgcatgttcatatcgcccataaatttgccaatcgtttctttaaacagctccggcttaacgctggagaaatactcaaccgggttattttcgctcggctcagccaatttatcgaaatcagcagtggtattcagggtgtttggcgattttttcacctgcgcgacccactgatcgaaatcaccctgagtcggcgtagcgatcgcagtgaatttcataccagagaagcctttaccgctgaaactactggaaataccgttgtatttaccggcttcattggcaatcagatgcagtttggtttgcatcccggccatcgcgtaaatttgtccgcctaactgaggaataaagaacgaattcatcactgagttggatgtgatcttaaagttcacgggaacatcagtagggaaggcgatttcattgacggtggcaataccttgttctggatagataaacagccacttccagtccaaagaaaccacttcaatagtgatcggttctttaccttcgacaaccaaaggtttgaacggatcaagttcgtgagaagttttccaggttatcgttgccagaatagcaatgataatgattggtacagcccatacaacaagctcaattttgttggagtgggaccagttcggggtataggttgcatttttgttggaagcacggaacttccacgcaaaggcaaacgccataaaaataaccggaactactacgatcaacattaaaccgatagcggtgagtatcagcgttttttgttcgagtccgattgtgcctttagggttcatcaataccatatcgcaaccagcgagtgttaccgtggctgcaaataaagacaacatcccaatatttttaatgtatttcttaagtctcatctaacgacctcaattacaaagggctctattgtcgtttcaggtgtgcgggcattttacgggaaggttgcaggactgtaaacacgcttaaggttgtgtcagcggcttgttgacactttatgttaagggggtcacagatgttgctctctttgataattttctaattgcaacaatatgttggcgcaagagttaattaacaagcgtaactaaaagctaactatattaaggaaaaacaatgccaagcaggattttattgtcgggaaatacagatttgggaggagtttatttacgattttatgtaaataatatgtatcttaaaagtgaattaaaatatattccggggtaaccaaaatggtttccccggaatcatttagttagaaattatatttaattgagtaaacgataccgtcttgtaaaaagtcttcgcccagcttgttataagcataacgatactgaataccagtggtgaattgtttcattggtgtccaccacagtgcaatagcaccgttcaccccgttacgaccgccgttacctgccgcatagcgttctgcacggttaaattccagctcgttccagttagtaatgctgaatttctcatcgaaagcggtgaaatcgtagccagcaacccaaccaacaacataaccgttattacctgagtaataagtttggtcaacgtagtgcagcgcaacgaaaggcttcatccatacgccagcaatggtggtgttatagccgataccgtacagggtattcacttcgtggaagttgctgtagttgttgccttcagcagctggcagagagtaggtgccataaacgtggccgtataggttaaaaccggtgtcgcctaaatagtagcggccagtggttttaaaggtgtaacgctggttatcgcccggctgagcagttttggagttgaacgggttttctaaatcgaagaagccgtaaacttcaccccagctaaaacctgcgccgccctctaattcaatataggcaaagtcatctttatgagatgaaccaccggatttatgcgtagtgctcttcgtccaatccaggtagttcatgctgatattgccgaaaccccattggtattcagcttgcgcagaaggagccagagtgaccgcagttagcgcgatggcgccaacgagaattttacgcataaaagcctcaattattgttaaaaggtgtcaggggaaataaaaggacatatgtccttaataaaaagtgcgcacatcatagtctgacagcacaaaaggttaaagacctgagggtgatttgaatctcattttaagaataatatttctgattagttgcttaataatgtgatcatgattgtggttttgtcgggtgtatacccagttgactaacttttacgtataaaaaagccggtaatagaataccggctattggtgaagcaacgtgtcgtcttaagtcaagcgggcgcgacgcagtgccagataatccagcgctccacccagtatcattccaacaatactgagttgaatccctcgtaatagcagcacatcggccacttctggcgctgcggtccatccccaggcattgctgattaatagcaccagccacgcggccaataataaacaaccgatggttaaaaagcgtaaggcccagcgataaccatttttaaattcggttcgaggcatgaattcatcggttttttgcgtgaattcaagggtatggcggcagatatagagtaatatcaggcccggaacggcggcggcgatggagaacagataaaatatcgaccagccgttagtttctacaaaccagcctgcaaccgggccgacatacacgcgaccaaccgcagacagtgctgacaataaggcaaactgagtggcggaaaacgacttattgcacagcgtcatcaaaagcgccacaaaggctgcggtacccatgccgccacagatgttctccagaaaaatggcgctccccatggtgaagatattcttgtctgtcaccgatagaatccaatagcccagattggaaaccgcctgcaagatgccgaaaatcatcagggcgcggaataagctgaggcgttgcataagcaaaccgccatacaaagcaccgataatcgtcgctaacagacctagggttttattgaccaggccgacgtcaccggcgttgaaacctagcccacgaatcagaaacggcgtactcaggctagcggcgaaagcatcgcccattttataaagcacgatcagcagtaaaatcagccaagcgttattacggccaaagaaatcgcgcagcggggcaacaattgcctgttccagcgttttaggtgcggcggcgggggcatccggttcaggagccatcagagtagcaaccaccccgataaccatcaaaccagccattaaccaataggttgactgccagccgagataacggtccgcaatccatagcgccaaaccgccggaaaccaacatggccagccgataacccaaaaccgaaactgcggcgccggttccccgttcttctgcactaagcaaatcggttttataggcatcaaaaacaatgtcttgagacgccgagcagaaggcgaccaataccgcaatcgctgccagccaccataaatgcttcgccggctccataaagcccattacgatgatagccactattaataatagctggctcaccagtaaccaaccgcggcgacgaccaaggaaagaaggggtgtagcggtccatcaatggggaccacaagaacttgaagacgtaagcctgaccgaccagagagaaaataccgatggttttcagatcaacttgctccaccgtcatccaggcttgcagcgtgccggacgtcagagccaaaggaagaccggaggcaaaccccagtaataaaagaatgagcgaattacgctgtgtaaacaggtttgaatagcgactggacataagaaacctacgtgctctgccccgattcagggcagagcaaagttaagcaaacaacagattaacgtgcgttttgtttgataaagctgttaacgctggtgtcttgagccatatccgcaataacgtcactgagcacggtattcactgcttcagttattttggcattggttgcggtaaatgcgccctggacattataggtagaacggtagttcttaacctgtttgttaccattttgcgcctgagctgtgatggagatatcagccttggtcgtgatgttgtagcgcagattaccttcctgcacgttggcgaacagttggttaactacgatttgcagatcaaccgggccgccggtaccaatcatatagccacgggcagtcatttgtttttccagcacttcctgcaacaggaagcgcaggtcgcgagatggcgttaataccaccaatttgccatcgcggttgactttggccagcgcggaatcctgacgctgatcggcaccgttgatactgatggtaattcccatcaaggtgggatcttgcggtggcaatacgattttcggcgtgacttcaagcgtattgctgttggtggcgcaacccgccagcatcaacgcggccagcagcgggaaaagaattttctttagcatgttcactttctcgagagttatggaatttttaataaactgagcgggatagctgcaatattattgcgacatcatagcactgccgcagatagggggaagatcccaatggtgacaaattcgccacaaatacggattttcatactggaaccctacaaataaccttttgccgtgacaatcggattatcctcaacctctggccgtttcgtcggcgttaggcgtatttaaccgagaattattgtcaaaggaatgttataaaacagccaaaaccgactaatattgctgtaagaaggtgtgcagttctctgccggtgcagtaaggagatctttatgattctgattcgcgaaaagatagaagaaaaactcagggcggcatttgaacctgttcacctggaagtgataaacgaaagctacagacacaatgtgcccgcaggctcggagagccactttaaggttgtgattgttagcgataaatttgccggtgagcgctttttaaaccgccatcgtgccatttatggcgtattgtccgaagaattagccggtgaagtccacgcgctggcattacatacctacacggtcaaagaatgggagagtctgcaagacaccttgcctgactctccatcatgccgcggtgccggaaccttggcataaatatggtatttgcctgatttccgtggaacttttctgctgatttaaggtattagtaatagagaaatccacaggcggcctttgggccgtttgttttttaactggcgacaacactatttttagcacagcgctgccagcgtttttgtcgagggatcgacgtccgcgtaaattttcgcgcgctgacattcactcgctttcctcgactcgaaacctatgcaccgctataatgtcgcgtcttatttttccggaatggtttcgggacgcttctgacatctgggatactcggttctgtaatgcggccgtcccggttcttagagggtgttttcagggccagtgtcattcctacaatggcagggttttgatagcggcttctggagttgaccgagcactgtgatttttttgaggtaacaagatgcaagtttctgttgaaaccacccaaggccttggccgccgtgtaactatcactgttgctgctgatagcattgagaaagcagtaaaaagcgagctgttgaaagcggctaaaaatgttcgcattgacggtttccgtaaaggccacgtgccgatgaacatcgttgaacagcgttacggcgcgtccgttcgtcaggatgtactgggcgatctgatgcaacgcaactttgttgacgcgatcatcaaagaaaaaatcaacccggctggcgcaccaagctacgcaccgggcgaatacaaagaaggcgaagatttcactttctctgttgaattcgaagtttatccagaagttgaactgaaagatctggaaaaaatcgaagtagagaaaccggttgttgaagttaatgacgccgacgttgatgcgatgctggacaccctgcgtaagcaacaagctacctggaaagacaccgatggcgctgctacagcagaagatcgcgtgactctggacttcaccggttctatcgacggcgaagagtttgaaggcggcaaagcaactgatttcgtactggctatgggccagaaccgcatgatcccaggctttgaagacggcgttgtgggccataaagcgggcgaagaattcactatcgacgtgaacttcccagaagattaccacgctgaaaacctgaaaggtaaatcagccaagttcgctatcgttctgaagaaagttgaagaacgtgaactgccagaactgactgaagaattcatcaaacgtttcggcgtggctgatggttctatcgaaggtctgcgcgctgaagtacgtaaaaacatggaacgcgagctgaaaggcgcagtgcgtaaccgtgttaaaactcaggcaatcgacggtttagttagcgctaacgaaatcgacgttccagttgctttgatcgacagcgaaatcgacgttctgcgtcgccaggctgcacagcgtttcggtggcaacgagaaacaagctgctgaactgccacgtgaactgttcgaagaacaagctaaacgtcgcgttgttgttggcctactgttgggcgaagtgatcagccagcacgagctgaaagctgacgaagaccgcgttaaagcgctgatcgaagaaatggcttctgcctacgaagatccgcaagaagttatcgagttctacagcaaaaacaaagagctgatgaacaacatgcgtaacgttgctctggaagaacaagcggtagaaacactgctggctaaagccaaggtaaccgaaaaaccaactaccttcagcgagctgatgaatcagaccactgcagcgtaatgttttttagcgcataacgttaagtatctttgacttggcgttttgacttctcaagcccgtcgcctttggctacgggcttttttcttcttgatttacacgataaaaacaacaaattctcggctatggttcccgtcaaactgggctatattaaaaaaataaaagaaagtgctgaattaaatccgtagcgagcgtctaaaaaacgcgtgaggtgagaaaggggcgttgagacaataaaaggtatggggcttgaaaaacagtatccttcccccaattactattacagactttatgttctatctttccttgcgttggctgattatcaccgctggatatgtctgggacgacctactgcttatcatggtcatcattgcttatctcaagtagaatcggttattaatggcgccaaagtaaattctattaggagatggtaatgtcatacagtggcgaacgagatcaatttgcacctaacatggctctggtgccgatggtgattgagcagacttcacgtggggaacgttcttacgatatcttctcccgtctgctgaaagagcgcattatcttcctaaccggccaggttgaagatcacatggccaacctgattacggcacaaatgctgtttttggaagccgaaaacccggaaaaagatatcttcctttatattaactcaccgggcggggtgatcactgcgggtatgtctatctatgacaccatgcagttcatcaaaccggatgtcagcaccatttgtatgggccaggcatgttccatgggcgcattcttgctgaccgctggtgcgaaagggaagcgtttctgtctgccaaactcgcgggtgatgattcaccagccgctgggcggattccaggggcaagcgaccgacatcgagattcatgcgaaagaaatcctgaaagtgaaatcccgtatgaacgaactgatggcgaaacatacggggaaacctctcgaagaaatagagagagacacggagcgtgaccgtttcctgtctgcggccgaggctgtagaatatggattggtcgatgagatattcaaccgccgtgactaacagcgtatttctgtgcgccgatagactataattggaaaagtttagtcttttagcacgctaaggtgccggcagtccgtttgataaagacgtgacgtccagaagtaacgagaatagtctccctgccgtcctgttgttagtgacggcagatactaaagaagaggtttactgatgacagataagcgcaaagacggttcaggaaagctgctgtattgctctttctgcggcaaaagccagcatgaagtgcgtaagctgattgccgggccgtcagtgtatatctgcgatgaatgtgtcgatttgtgcaacgacattattcgcgaagagattaaagaggtcgccccgcatcgggagcgtagctcattgccaacaccgcatgaaatccgtcgccatctggatgattatgtcatcgggcaggaaccagcgaaaaaagtgttggcggttgcggtttataaccattacaagcgtctgcgtaacggtgataccagcaacggcattgagctgggcaaaagtaacattttgctaatcggtccaacgggtagcggtaaaacactgttggcggaaacgctggctcgtttcctggatgtgccattcaccatggccgatgcgacgacgctaaccgaagccggttacgtgggtgaagacgtcgaaaacatcatccagaaactgttgcagaaatgcgattacgatgtgcagaaagcgcagcgcggtattgtctatatcgatgaaattgataagatttctcgtaaatcggacaacccgtcaattacccgtgacgtatcaggtgaaggcgtacagcaagccttgctgaaactgatcgaaggtactattgctgccgtaccgccacagggtggacgcaaacatccgcagcaggagttcctgcaggttgatacctcgaagattctgtttatctgtggcggcgcatttgctggtctggataaagttatcgggcagcgtctgaataccggtaccggtattggttttggcgcaacggtaaaaggaaaatccgagaaagcaaccgaaggcgaattgctaagacaggctgagccagaagatttgatcaagttcgggttaattcctgaattcattggtcgtttgcccgttgttgctaccttgagtgaattgagcgaagacgccctgattcagattctgaaagagccgaaaaacgccctgaccaagcagtatcaggcgttgttcaatctggaaggcgttgagctggaattccgcgatgaagctctgacggcgattgctaaaaaggcaatggcgcgtaaaaccggtgctcgtggcctgcgttctatcgtagaagcggctttactggacaccatgtacgatctgccatctttggaaagtgtggataaagtggttgttgatgaatcagttatcgccggtcaatctgcaccgctgctgatttacggccagcctgaagcgcaagcttctggcgaataattagccaaataatccagacagttagtaagataatgggggattttatcccccatttctttttcctcgcattgttatcgttgaatgtaagacattcgtccccatatactcaataacctatttagtgaaactcgtgacctcccgtgtttcacgagatttcctgaaatctggcggaagctaaacataagagagagctctatgaaccctgagcgttccgaacgcatagaaatccctgtattgcctctgcgcgatgtagtggtttacccgcatatggtgatcccactgtttgttggccgggagaagtcgattcggtgcctggaagctgcaatggaacatgataaaaaaatcatgttggttgcacagaaagaagcgtcgacggatgagcctggtatcaacgatctgttttctgttggcaccgttgcctctattttgcaaatgctgaaattgcctgatggcacagtcaaagtactggtcgaagggttacagcgtgtgcgcattaccactctgtctgacagcggagagcatttcgctgcccaggccgaatacctggaatcacctgcaatcgatgagcgtgagcaggaagtactggtgcgcacggcaattaatcagtttgaaggctatatcaaactgaataaaaaaatcccaccggaagtcctgacctccctgcatagcattgaagacgctgcacgtctggcggataccattgctgcacatatgccattgaaattgaatgataaacaagcagtgttggaaatgttcgacattaccgaacgtcttgaatatctgatggcaatgatggagtcggaaatcgatctgttacaggttgagaagcgtatccgtaaccgcgttaaaaagcagatggaaaagagccagcgtgagtactatctgaatgagcaaatgaaagctattcagaaagaactgggtgaaatggacgatgcgccggatgaacacgaagcgctgaaacgcaaaatcgaagcggcgaaaatgccgaaagacgcgcgtgaaaaaaccgaagctgagctgcaaaaactgaaaatgatgtcgccgatgtctgcggaagctaccgtagtgcgcggttatatcgattggatgttgcaggttccgtggaacagccgtagcaaagttaaaaaagacttggtcaaggcgcaggaagtgttggataccgaccattatggtttggagcgcgtgaaagaccgcatccttgagtatcttgcggttcagagccgagtcagcaaaatcaaaggcccaatcctttgcctggtagggcctccgggcgtgggtaaaacctctctggggcaatctattgccaaagcgaccgggcgtcagtacgtccgtatggcgttgggcggcgtgcgtgacgaagcggaaattcgtggccaccgtcgtacctatatcggttctatgccaggtaaattgatccagaaaatggcgaaggtgggtgtgaaaaacccactcttcctgttggatgagatcgataaaatggcgtccgatatgcgcggcgatccggcgtcagcgttgctggaggtgctggatccagagcaaaacgtggcgtttaacgaccactatctggaagtggactacgatttgtccgatgtgatgtttgtggcgacctccaactccatgaatatcccagcaccgttgctggatcgtatggaagtgattcgtctgtctggttataccgaagatgaaaaactcaacattgctaaacagcacctgctaccaaaacagttcgagcgtaatgccattaagaaaggcgagctgactattgatgacagcgcgattattagcattatccgttattacacccgcgaagctggggtacgtagtctggaacgtgaaatttccaaactgtgccgcaaagcagtaaaaaatctgctaatggataaaacggttaaacacatcgaaatcaacggggataacctgaaggatttcttgggtgttcagaaggttgactatggtcgcgccgatactgaaaaccgcgttggtcaggtaacgggtctggcatggaccgaagtgggtggcgatctgctgactattgaaaccgcctgtgttccgggtaaaggcaaattgacctataccggctctctgggtgaagtcatgcaggaatccattcaggctgcgctgacagtcgttcgtgctcgtgcggataaattggggattaaccctgatttctacgaaaaacgtgatattcacgttcacgtacctgaaggcgctacgccgaaagatggcccaagtgcaggtatcgcaatgtgtactgcgttggtctcctgcctgacgggtaaccctgtgcgcgccgacgtcgccatgacgggtgaaattacgctgcgtggtttggtattgcctatcggtggattgaaagaaaaactgctggcagctcatcgtggtggtatcaaagtggtactgatcccagatgagaacaaacgtgatttggaagagattccagacaacgttatcgccgatctggagattcatccggttaagcgcattgatgatgttttagccattgcgttgcaaaatccggcctttggcgcacagcctgttgcgtcaaaatagtgacggatagcaagaagtattgataaaactaatgctggtaagcgaaatcctacttgccagctattttttgtgccgctaagttagatcggctgtctgacgaaagcattcgcctttaggttgcttgccaaggctagacaggattgatataacagctgcgctgtcgtgttgtccgtagggattttcggcgcgacgatagaattctaaaggggatgaaagagtgaataagtcacaactgatcgacaaaattgccgcaggtgctgatatttctaaagcggccgctgggcgcgcgttagatgcaattattgcttctgttactgaatccttgaaagaaggggatgatgtagctctggttggtttcggtacttttgcagtacgtgagcgctctgcccgtactggccgtaaccctcagaccggtaaagaaatcagtattccagctgcaaaagtaccaggcttccgtgctggtaaaggcctgaaagacgcagttaactgatgactacctcagatctcttcggtgccaaatattgtttgtgataaacaataacctgacgcagttgagttggtaaggtaagatataaggcgcatcgtaactgatgcgcttttttttcgcttggcagttgaactggcgtaaaatgctgacttagccgtaaggcaatggcggcgttggccactgtgagaagttttatcgcgcagcaacgattttgggctgacgcaaggaacgctgggtcttcatacctgagcaagagtttttatccacattacagcggagtattgtcacattatgatggacaatttacgcgcggctgcaaataacgtcgtgctcaaaatcatcctggccctgattatgttgtcctttatcctgaccggcgtgggcggctatctgatcggtggctccaacgactatgcagctaaggttaatggccaagagataagccgtgcccagcttgaacaggcaatgcaaagtgaacgtagtcgtttacagcaacagctaggcgagcagttctccgtgctggctggtaatgaaggttatatgcagcagctgcgtcagcaggtgttggggcaactggtcaacaacatgttgctcgaccaatatgctaaacaactcggcctgactgccagtgtcgatcaggtaaaagaatctattcgccagattccttatttccagactaacggtcagttcgataacagcaaatatctcgagctagtaaaccgtatgggctacagcctcgatcagttcgcgcaggtacaacgtcagcagttgattaatcagcaattgctacaggcctttaacgacagcggttttgcactgccggcagaagctaccgctatgtccgagctgattttgcaacagcgtgaagtgcgactggcaaccttggatctgaaagcgttacaggctcagcagaaagtcactgatgaagagctgaaagcctattacgatcagaacaaaaacagctttatcgcgcctgaagagatgaaagtgagtttcatcgccatggatgcggcagcgatgcaagatacaatcaccgtgactgaagaagatattgctgcttattacgatcagcacaaatccagttttactcagccggagcgcagaaattacagcgttattcaatttaaaaccgaggcagatgccaaggctgctttggatgaactgaaaaaaggtgctgatttcgctacgttggcgaaagaaaaatccaccgacattatttctcgtaaaaatggcggtgaactgggttggttagaacctgagacaaccgccgatgagctgaaagaagcgaatctgaccgaaaaaggccagctgtctggcgtggtgaagtcttctgtgggttatttgatcgttcgcttgaacgacgtcaagccagagcaggttaagccgctgtctgaagtgcatgattcgctggcagccaaagttaagcaggaaaaagcggttgatgcttattatgcgttgcagcagaaagtgagcgaggcggcaaccagtgataatgagtctctggcttcagctgaagaagctgctggtgccaaagcgaagcaaaccggttggtttactcgtgattctgtacctgccgaagtgaatttcaaacccgtagttcaggctatctttgatggcgctttggttggtgagaatggtgctcctggcagtaactctgatgtcattaccgttgatggcgatcgcgcattcgtgattcgtatcgatggtcataaaccagaaggcgtacagccatttgatcaggtacgcgatcaggttgctgaactggttaaacgccagaaagcagagcagcaggctcgcgttgacggtgaaaaaattctggctgcgctgaagcaagataaaggcgaagaagcgatgaaagccgctggtctgagctttggcgagaagaagtccatcgctcgtgcgccggatgacgatcagttagttcaaaccgtatttgcgctgcctcatccgcaggcggacaaaccggtttacggtttatctcaggatcgtcaggacaatattgtattgatcgaattgctttccgtgacgccgggtaaattaccagagggtgaaatggcaaacttcattgctaaaatggaagagggtatcggcggggtgactctggatgcgctgatggctaacttgcacaaacaggcaacgattaaaatgggtgctgcggaacaacaacagccgcagtaaacatcgcaaacctctgcaaaccgatgtaacaatgaaaggccgctttagcggcctttcgcatatctggaatccgtgatttgccgaaaaaaaacgcttgaggcaaggtacagatgctgtcaaatacatggaggatacagcatgaaaaataatggaaaatccttagcactggcattgctactggcctggttatcagctccggtaacgctagcggctcctaatcaaacgaaagaatccgtgcaaaccaactcatcaaaagcatcggctcaaacctcagagaagtcgtggaataggtcgaaagaaaataacttgaaagctgacggagcaaacaccaataagccttcagccgggaaaaatgagacagaagacggactgataaatgttaataaagccacggcagaagagctggctgctgcgctgagcggtattggtttgaaaaaagcccaggccattgttcgctatcgagaggaatttggcttctttagtcaaatagagcaactgcaagaggtttcaggtattgggccgatatttattgagcgcaatcggcagaaaataaaaatgtaagttgaatgatatttaatcatttagttagtggtttataacattggctgctaacctttcatcaggtcataccagttctgtggcgtatgtatttgaaaaattcataaatgatgaaaggggcgttgattagcatgcatcatgaagttttggttagaagctatcatgttgatggttatttacatgtcaataattcacgttatttggagttctttgaggaggggcgctggcgttggcttgatcgagagaatcggctggaatggttgaaagaacggaatattggtttctatatggtaaatatcaatattaattatcgtaaaggggccgttgagggagatctgctacgaattgagagtctggtgtattccctggaagggcgctgcgggaaattcaagcaggtcatgaaaaggttatcggacggcgcggttatcgcagacgctgatatgacgtttgtctgcatagatatgggaatacaaaaagcgctgcctatggaaggggagttaaaacacaaattggaattattaggtaactaacttattggtatattttttactatagctgagctaatggggtgcgttcagttcagctattttattctgcaatagtggagttggtgtaaggctgttcgcagagagcgaaaatgtaaataattggttaactaactgtgatctaaatctaagttatatagtgagtctgctatgtgcttgggtggctctgctattatcgatgaggtcataccagtttggtttacagttctggcagatgcttacctgcattcgattttatcccgtagctgaggttttctatgcgcacccatataacagttcgtggttttcatattgacgtttatcagcatgttaataatgcccgttatcttgagtttcttgagcaagcgcgctgggaatggctggatggggaggaagcatttcagtggatgacccgcaaccatatcgcttttatcgtggtgaacgtcaatattagttaccgtaaacccgcggtgttaggtgatgtgctacgcatagatagccatttggtaaaactcagtggtaaaagcggggtgcttaatcagattgtgaccttagagtccgatggttcgctggtggctgatgccgcactgacttttgtttgtattgatctgagaacacaaaaagctgtgccaatagacggcgagcttcgggaaagattgagtgcgttagaagagccgacgcaagggcagtagtcgtcctgatgagcaatggtgctttaattagcttactttgaaaatcgttgcggctatttgggttcagtttgttcgaataatattttgcattgctctatagctctatagctctatagctctatagcaagcagcctgtgaatttatgtatcacagactgcataggcctgtttaggttgaaccgattagggctgaaccaaactggggaaactgaaattaaagtagaccgattttctttttaaggctggtcgtgacagcagacttattagttaggtaattattcagcccattagcccgtaagtggcaggctgcacattcgccgcagccatcgcctttaatgccgttatagcaggtcagcgtgtggtggcgaataaggtctagctgttggtaataatcggctaatgcccaggtctcagctttgtctagccacattagcggagtgatgaaagcgatatcccgcgcgatgccgagattaatggcatggttgagggctttaacaaattcatcgcggcaatctgggtagccagagaaatccgtttcgcatacaccggtaatgaccgcttctgcttgtacctgataagcgtagattgccgccagagtcagaaacaggatattgcggccgggaacgaaggtgctgggaatggcattttcgctgctttcttcataagtcggcacgggaatactgtcgcgagttaggctactgaccgccagctcgtttagcatgcagacatccagcactttgtgcgctttggcgcctaattgaatgacaagttcgcgggctacgtcgatctcttcacgatggcgctgaccataatcaaaggtcacacagtgaacttcatcatattgctgcaatgcctgaatcagacaggtggtggagtcctgcccaccgctaaatactacgactgcgcgtttcattaatcgctccctcgtaggcttaaggtcgatataacaataaccttgagccggaaattaaatactgtggctatgttaactcagttagctggctaaaaggtaataacaggccgaattgaatcagtgaagccattgataattactgtatctgcaataagcgctatccaaggatagttcgctttaattatccaatatggcgttatccagcgatgactctggggtagggggcaaccaggcctgacaaaaatcaaaccaaccgtaggcggtgagcgtaacgcctttgattctcggtggcgcactaacctgatattgataatttaatagcggcagaaccaacccggtggacatcagctgtagatagtgttcccgcaataatgcataacgttcacttggtgctttaacctgttgaatttgcagtaatgactgctgttgccaaagcagtaagtctgccggaagaataccctgccataaaaaatcatggcgtaaccaactttccatggtggcttcgcgggattctccaacaagatggtctgacattaagaggtctgcttgttcacattggttaacgctttgccagtgtttgttggcgcaaaattgaacttcaagctcgcagccgtgttcggcgagtaattttttcaactcgctggcaaccatggtcaactctgctggttgctggtagagcaaaattagccgtttaggtagcgtgatgcttttatcttctgggaaccgagggataggccagccgggcaacatttcttcgctgggaatgataattcccctttgaatggataaatttgccaaaaaaccggatgcctgaatcagcatcatcatttttctggcttgctgggaattgagctggcctcgtttcaggttcatggctaaatagcaaaaacctaggctggtactgcgttgaacaggttttgccaagggcatatcttcgctttgcccaatggtgatgctgaccggatgctggctgctgccgttaaccacaacatccggaggctgtggggagatccagtattcgatactgtcgagatagggatgctgcaaatgataaaactcatgttgttcgagccttatcaagtgtttttcaaagtcggctactttaaacggcccggcgcctaccgatggagagtcagggtgaaacaaacgatagggcaaatcggccatacggtgagccaaccagtaatcgggatattcaagggtaaactggacgcataacgcatgcggcagagttatagatttaacattttccagccccggctgaccgcgaggatggtgacgcagtatatggaaggtttccagtaactgtgctccgctaatgggatcgccattatgccagcgaagctggctgcgtaagaaaaattgccaggttaggccatcatcactaatgtgccagtgatgggccagatcgggctttggcagaggatcaccggtctgaaagcgggtcagacccgcatgtagcgtatatatcaaatgctgttccgcgcgcccgttggtttctagcggaattagcggttccagctctcgataataaggaattcgtagcaccgggctatccgcttgccattgcccgcccatatgtgggctaagtaatgcatgcagacgctggggttccaactgggctaattgaaatgcaccctgatgatccccttgttgtaataactggcgtagataggttgctcgcaattcatccggtgttttcaggcagtgaattcgtgctcgtttgcctctgccaacttgcgcatcccaactgagccagccctgttcctcaaatttttggataagggttctggtatgccgatcgctacaaaaaaacagcttggctaattcactaaccgtcgtgttaccagcctgctggccaaattcttgatataaacgctgatattgagccaatcggtgaaatatgcgcatagttaaatccggaagggtttgtattaattgttcactattagttccctaaatactacgccatacttttgtcactgccagcaggctcacaattttatgaggtaagtatgtaccgcttagccgctttcgatatggatggaactttattaatgcgtaaccatcagatcggtgaggcgactttggaagcgctgcatcaattgcaccagcgacagataatggtcacttttgctaccggacgtcattacctcgatatgaaagggattttatccagtttaggaattaaaggttatctgattaccggtaatggaacccgtattcatgatattgacggcaataaattgcagggtacagatttacccgcggaattagtgcagttcgttctgggaacaacctggtctaccaacgccagcatgcatatttttcgcgatgaaggctggtttaccaatcgtgacgatccggcgcagttaacggcgcataaactgagcgggtttaaataccaactcactgaatttaatcagttacctttggcaggaacacataaaatctgtttctgcgcgcctcacgaagagctgttaccgctgaaagacaggttagctgcgcggatggggcaagaggtggatttgtgtttttctgccagggactgtctggaagttttacctcgtcactgtaataaaggtgctgctctggcttcgttgacagaactattgggtgttgaaatggtcgattgcatggcatttggcgatgcaatgaatgataaagaaatgcttgatcaggttgggcgcggaatggtaatgggtaacgcattgcctcagcttaaatcagcattgccgcagcttcaggttattggccattgtgaacaacaggccgtagctcactatttgcaacattggctaagttcaccacacctcacctattcccccgaattctgaggtgattgctattagccagccggatatttatccggcttttttttttgcttattatcgaccaactttaaataaattggccgatgaactggatgattaaaggttttccaactccgccttaaaactggttaaatccccaatgttagcgctcacccattcagggttgtaataagtatccagatagcgttctccgctgtcgcagagcagagtgacaatagctcctgactcgcctttttcacgcatttgtcgggctaactgtaaagcaccccatacgttagtgccggtggaggcgcccactttacgacccaaaacgccttctaaccaatgtgccgtagcaacgctggccgcgtcgggaacgcgtagcatgctatcgatcacctcaggaataaaagagggttcggcgcgcgggcggccaatcccttcgatgcggctgccgcaggtgccggttacgctgcgatcccgattgcagaagcaatcgtaaaagaccgaattttccggatcgactaccatcaattgagtattatgcccctgataacgaatataacggcccagcgtcgccgaagtgccaccggtaccagcgctcatcacaatgtaattgggaacggtaaagggttcgcgggccatctggcgatagatactatcggcaatattattatttccgcgccaatcggtagctcgctcagcgtaggtgaattggtccatataatggccgtttaattcttttgccaactgctcggacgcggcataaatttgccccgcatgatcgacaaagtggcagcgaccaccgtaaaaggcaatttgttcgacttttttgcgcgcggtgcagcttggcataactgcaataaacggcaacccaatcaggcgggcaaagtaagcttcagaaaccgcagtgctgccggaagaggcctcaataatagttgtcccttcctttatccagccgttacacaggccgtaaagaaacagagagcgcgccagccggtgtttcagacttccggttggatgggtgctttcgtctttcagatacaggtaaatgccaggaaactcaggcaaatttaagcgaattaagtgtgtatcagctgagcgttgaaaatccgcctctatttcactgatggcgttttttacccaagtattggtcatgtagtggcctgcgatgtcgggggtatcaaattatgactaggttaacggtattttgggaaaaaattgttgccatttttacttctttatctcctaatgagagaaatttattctctggagtggcgatatgttagataaaacagaccgaaaactactgcgtatgttgcaggaggattgcacgctctctcttcaggttttggcagaggcagtcaatctgacgtcaacgccttgctggaaaaggctaaagcgtctggaggatgaaggttatatccgtggccgggtggcgctcttggatagcgaaaaactggggctgggattaacggctttcgtactgataaaaacccaacagcataatagcggctggtatcaggagtttgtgcaattcactaagcagatgccggaggtactggctttctaccgtatggccggagaatatgactatctgatgcaggtcgaagttgcggatatgaaaagctacgatagtttctataagcgtatggtgaatggtgttccggggttgatagatgtaacttccagcttcgcaatggagaaaattaagtacacaacggtactaccggttcctgagtgaataattcactaaataacaactttatcgatgttattctatgccgcatgagccgtggcgagagagtctgacattattcgattcgcctccatactatttcccttcatatcatggaataaaactgcgtgagattgtttgctcaactaggctggtactttcgtcgcgaatggcgtcgctatttgggtgcggtagtactgctgatcattatcgccattttacagctgttgccacccaaactggttggggtcatcgtggatggtatgacggaaaaaaccatgtccgccaatatgttgtggacatggattggcgtaatggtagtgaccgcgataatagtgtatctgctacgctacgtctggcgcgtattactcttcggcgcatcctatcaattagcggtggaattacgctctaatttctaccgtcagcttagccggcagaatcctggtttttacttgcgtcaccgcacaggcgatctgatggctcgcgccaccaatgatgtcgatcgagtggttttcgccgccggtgaaggggtattgacgctggtggactcattggtgatgggctgtgcggtgctgattgtgatgagcacacaaatcagctggcagctgacgctgctgtcgttgttaccgatgccgataatggcgattgtaatcaattatttcggtgatttattgcaccaacgttttaaatctgcgcaaggggctttctcggcgttaaataatcaggcgcaagagagcctgaccagcattcgcatgattaaggcatttggccttgaaaatcatcagtctgagcagttttcccgtgtagcaaccgaggccggtgcgaaaaatatgcacgtagccaaggttgatgcctgttttgatcctacgatttatatcgctatcggcgtagccaatttactggccatcggtggcggtagctggatggttgtgaatggcagcattacgttagggcaattaaccagttttattatgtatttagggttgatgatttggccaatgctggcgctggcgtggatgtttaatatcgttgagcgtggcagtgccgcttacggccgtatccgtagtttgttggaagaggctccggttgttgtcgatggacaaacgccattacaggcggaacgcagtactttgacgattgatattcgccgctttgattatcccggaagtgataagcccgctttacaagacgtcaagctgaagctggagccaggagagatgctggggctatgcggcccaaccggttcggggaaaagtaccttgctggccttgattcaacgacagtttgatatagacgaaggtgacatttgctatcaggggcaacctctgacggctattcgtttggacgattggcgtagccgcctgtcggtggtcagccaaacgccatttttattctcggataccgttgcaggcaatattgcattgggtaagcctgacgccacgcagcaggaaattgaacaagcggctcgtttagccagcgttcacgaagatattctgcggttaccacagggatacgaaaccgaagtgggagagcggggcgtgatgctttccggtggacaaaagcagcgtatttctattgctcgcgccctgttgcttaatagcgaaatattgattctggacgatgctctgtcggcggttgatgggcagacggagcatcaaatcctgaagaacctgcgtcagtggggagcacatcgcaccgttattattagcgctcatcgtctctctgcattgactgaggcaaatgaaattctggtcatgcaacaggggggcgtggtgcagcgtggcgatcatgagcagttactgaatcagtcgggatggtatcgggaaatgtatcgttatcagcaaattgaagcagctttagatagcgatgaagggctggaggtcgtatccgatgagtaaagctcgacaactttggccgacgttaaaacgtctgctggcttatggttcagcctacaaaagacccttgtctatcgcgatagtcatgctgtggattgcggcagcggcggaggtaagtggcccactgctgatcagctatttcatcgataatatggtcgcaaaaggcaatttgcccttggctgtagtgagtggcttggcgctggcctatttgctgctgcaactcttggcggcggcgctgcattattttcagacgattctgtttaaccgggctgccgtgggtgtggtgcaacagttgcgtattgaagtcatggatgccgcactacgccagccgcttagcgcatttgatactcagccggtcggtcaattaatttctcgcgttactaacgataccgaagtcattaaagatttatatgtgatggtggtttctaccgtgctgaaaagtgcggcgttaattggcgcgatgctggtggcgatgtttagcctcgattggcgtatggcgtggattgccatctgtatttttccggcggttttggtggtcatggcgctttatcaacgctacagcacgccggtggtacggcgagtacgcgcctatctggcagatattaacgatggttttaacgaagttatcaacggcatgggggtcattcagcaattccgccagcaggttcgttttggcgagcgaatgtctgccgttaatcgggcgcactatagggcgcgaatgcaaactctgcgtctagaaggcttcctgctacggccattactcagcttgttttcggcattggtactttgcgggctgttgttactgtttgggttgagcccagaaggctcggtgggtgtgggggtactgtacgcgtttattaactaccttggtcgcctgaatgaacctttaatcgagctaacttctcagcaatcaatcatgcagcaggcggtggtggctggggaacgtatattcgaactgatggatcgcgctcagcaaggttacggtcaggataataatccactgaccagcggtcatatccggatgcgggacgtttccttctcttatcgttcggataaaacagtgctaaaccacatcaatctggatgtgccgtcgcgaggctttgtcgcattggtcgggcataccggcagtgggaaaagtacgctagccaacttgctgatgggctattacccggtacagcagggagagattctgctggatgggcgcccgcttgacacactctctcatcaagtgctgcgacagggtgtctccatggtgcagcaagatccggtggtgttggctgattctttctttgccaatattacactggggcgtgatatcagtgaggaacaggtttggcagacgctggaaaccgttcaactggcacctttggtccgcgccttgccggaaggattacacactcgtttgggggagcagggcaatacgctgtcggttggacaaaaacagctactggctatggctcgtgtattggtacaaacgccgcaaattctgattctggacgaggcaacggccaatattgactccggcacggaacaggctattcagaaagctttgcacttaatccgaaaaaataccacgctggtggtgattgctcatcgtttgtcgaccattgtggatgccgacagtattttagttctgcatcgtggacaagcggtggagcaaggcaagcatcaggaactccttgcgcaacagggccgctattatcaaatgtatcaattgcagttagttagcgaagaactggagaccgtcgaaccggaagaagccgctattagctagctcagattgtcagggggagctttccccctgaaattcaattcatgcccgcttattttcttccccgcactaaaatctggcgtcttgcgccgccttgttcgtggaaatgcacttttgtgacgcgtgtggcactattttggtgcacaaaaaacgtactgctcgctgctgcggtgagattcacacctatactgaagtcgataatccatcctcaagcctctttttatcaataaattcttcgctagtttatttatggcacatcctttgctttatccctgatgcggcagacgttattcggacttaattcgagaaggggcaaatatgaagctggttaccgtggtaataaaaccattcaaacttgaggatgtgcgcgaagccttatcctccataggtattcaggggctgaccgtaaccgaagtgaaaggatttggtcgccagaaaggacatgctgaactttatcgtggggctgaatatagcgttaatttcctgcccaaagtcaaaatagacattgctattgccgatgatcaattggatgaagtcattgatgtcatcagcaaagcggcctacaccggcaagatcggtgatggcaaaattttcgttgccgaattgcaacgggttattcgcattcgtaccggtgaaacagacgaagcagcgctctgattctaggctcaaatttagtgattagggatgggttgataatgaaaaaacgtttatccgtgtggggcctgagcgcagcagccatgttgccttcgatggctatggccgccgcgcctgcggtcgctgataaagccgataacgcctttatgatgatctgcactgcgttggtgttgttcatgactatcccaggcatcgctttgttttacggtggcttgattcgttcgaaaaacgtgctgtcgctaatgacacaggtgatggtcactttcgctctggtctgcgtactgtggattatctacggctacagtctggctttcggcacaggtaacgcattcttcggtggtttcgaaatggcaatgctgaaaggcattggcttgaccaacctgagcggcactttctatcaattgattcacgttgcgtttcaggcttcattcgcctgtattaccgtggcgttgattgtcggtgcctttgctgaacgtatccgcttctctgcggtgctcattttcactctgatctggctgactttctcttatttacctatggcgcatatggtgtggggcggcggttttctggcacaggatggcgcgctggactttgccggtggcaccgtggtgcatattaacgccgcggtagccggtttggtcggtgcctatatgctgggtaaacgagcaggctttgggaaagaagcctttaaacctcacaacttgcctatggtctttaccggtaccgctattctgtatatcggctggtttggctttaacgcaggttctgccagttcagcgaatgaaattgccgcattggcctttattaataccgtggtggccacagctggcgctattttatcctgggtatttgccgagtggattttacgtgggaaaccatcgttgctcggcgcttgttccggctgtatcgcgggtctggttgctattacgccggctgcgggcaccgtgggcgttggtggcgcgctgattattggtttagtcggtggcgttgctgggttgtggggcgttgtattactgaagaaatggctacgtgttgatgatacttgtgatgtatttggcgtacacggcgtctgcggtatcgtaggttgcatacttaccggcgtgtttaccgcatcttcactgggaggcaccggttatgcggctggtgtcaccatggggcatcaggtcggcgtacagctcttcagtattggcgtgtgtgttgtctggtctggcgttgttgcctttatcgctttcaaaattgccgatgttatcgttggcctgagagtgccagaagagcaggaacgcgaaggtttggatgttaacagccacggtgaaaatgcttataaccagtaagaatttgagttcgaaataagtaatatttagtgaaggggcgatattgatttcgcccctttgttgattaaagagattagaaagaagtaaaaccgaatgaatcagcggcacaagtacccatcagccgcgtaaacgaataaccccttcttgcaccgtagaggcgacgagcacaccctggcgattgtaaatctgaccacgaacaaagccacgagcgccggatgctgaagtactttctaccgtatacaacagccattcatccaggcggaatgggcggtggaaccacatagaatgatcgatggtagcaatctgtactcccggctcgagaaaaccgatgccatgaggctgaagagccgtcggcaagaaattaaaatcagacgcgtagcccagcaaatattggtggatatccaaatcgtccggcatctggccgttagcgcggaaccatacgtgacgcagcggttcttctttatgacctttcaacgggttatggaatttaaccggtcgcatttcaatcggctggtggccaataaacttatcccgcagtttttctggaatcaggtgcgccagatttttggcgatttccgcttccgataccaaaccttccggcggtggcacatccggcatgtcattctgatgctcaaatccctcttcaggcgtttggaatgacgcggtcataaagaagatcggtttgccattttgaatagcgctgacgcggcgtgcgctaaagctggtgccatctcgcaggttttccacatcgtaaacgataggtttgctgctgtcgccggggcgaagaaaatagctatggaaagagtgaatgtaacgatcggctggtgcggtctgtttcgcagcataaattgcctggccgacaacctgtccgccaaatacctgacgcagccctaagtcttcactttggccacgataaagaccttcttcgatcttttccagattaatcaagttgaggagcttttgcagtgcctgacccatggtgtggccctctgtgttttctttcagcatagtgtgctgaattattaggtagctcgtcaatgtattgctattaattcactatacaaactattgtttgtagagaaactaattgctaactgaatgattaggctggatgtcagaaacgccaggtagcgttttatgctataattacctgtctaggtggttgaagccacttattaagcgccggattttcgatgagtcaccggcattgggataataagaaggagacgaccctatgaaactatggcagatagttggcggcgcagcattaacggtaaccttggcgggttgcgcgaatcacggcgcagaagttcctacccagacggcagcaagcgccgcagcgacctcggccgctatcgcgcagccatcagtcagaggtaccgtaaatattcgcgaacgtgtggcattgccacctgacgcagtcattacggtaaccttgtctgatgtttctttggccgatgctccttccaaagtgattgctcagcgtgcagtgcaaaccgacggcaagcaggcaccttttactttcgtgctgccgtttaatcctgcggaaattacgcctaacgctcggattatccttagcgcggcgataactcagaatggccagttattatttatcactgataccattcaggaagtgattaaccgtggtcaggggacaaatgcggatctggtattagtaccggtaacctccgcgccaattcagactacaccttaatcacctttgagaatgacataaaagcaggatggaatagatgccaaggcgtattttcccatactgcttttatctttctgttttaattttccgctattaccaacgccaggcaaatcgtttaaggtcgatatatccttgaacttcaaaagtgacaccttccgctagtaaggctttttgctgacgcaaataatcttcgccgcttagtgagatttcaccgtggcgattgacgacacgatgccagggtaggctagtgccttccggcaggcgtttcagtactccaccgacctgtctggctgcccgtggcgagccgcacagacgcgcgatggtgccataggtggtcacctgaccataaggaatggcggataccacatgaaatacgcgctgacggaaactatcttcttcctgttccatactctgcggagctctttttaaatgaatgcgagtgcctggaattattatcatgcaatatccccggagctgcgagaaacatatttctgacggccactagccatttgttgggcaagaaaccaccagttgatgcgggttgtcttgctatttagcggggtatggtcaataatgcccaccgcttcggagtatcaggagctgtcaatggaggctctgttggttctcccgcaacactaacttgtgaactcggtcaggtccggaaggaagcagccgcagcaggcgaggtgtgtgccgggatgtagctggcagggcctccaccaattctggcctagcctaaatctctcctgtttctcatatatcgccatttacacccaacgacttatacctgactactcctacctcactacccagatgatttaatcgctttctttaggctgttgcagcgatttcaccaacgtttgctctctccccgtagttatccttttagcctgtatcgtttaaccgagacaaaggcacaatatgctcaatacattttgtatttagatatctctctttgtcatccccatagtttatcaatggcaagaatggatatttttaaaaaactacggggaaaaagcgttggggtgtttcttataagaattgaatttttagccactaaccataatacctaaaccttgaagctaaccattattgttttggataaaaggctatttttaactggatttgacaaaattagattaaaatattggcgtaaaggggtgttgtaccgggttacgtaaataaccgtacagacagaaaagagtttttacatagtttatgataaccgttaaatcattaccccattgaagccgatagggttatcggctcaacgttgttcgtcttaaccagcgctaagcgatttaccttacatacttccaaacacccataggaatcttatcatacagtttattcatagttagctcagccaggcgatgatctgcggcggagtagaataattccagttcgtcatcagatagttcatacgtatttttttcaataacacgttctaaagtgtcaattgttgtgcattttcttaaacgcatcagatagtcagttttggtcataatggaaattcttctcaatatatgaataaaatatgaataaagaaattatagggcactatcccttaatttttcatcagggtacagacgtattcccctgagaatagtctgaataatcggtcttttgttttctgccagcgacgcaattccgggtcattaattccgtaactactaaacagtgtataagtgtcgtctagatattcctccactaactcggagaggtccgcttcttccgcgtattttattttaaaactcatcacaaatgaagctatatgctcgatcaaatcatttaactgtaaatttatcgcagaagtcggatcgtttacccagccgtggtgactatcgcctaatgtggcaataccttcatcatacaaattctcacataagaatttcaactgagcaatatcatgtcgcttaggtgagtactcatccatatcatcccctccgttaacgcttaatcggtgcgataacacatagtgagtagactgataatcattatacgaacaggtaaacagccagaaagtaaataagtctgtcgtatacaaatataaatcattttttcagtcactgctctatctttattacttaatcttacaattcatcagcggtagagggtttgtcgtaatctattatatcaaagattattttttcaggatgtacaataaatgttacagcgttagtaatgtaatcttgggtgttgatatcaagacaggcgttaaaaatataccattgataacggtaagtcattgaataatcgttaagctgaatgtttttaatctcaagaatttctaatgagcctgcagcgtagcgtgcatcttcggaataatacattagcccagacgtcaggttttcttcaatcgtgctgatattatcttttattacctcactcagttgtgaaacagagctgaggcagcgggagaagtctcctcggatttccttgttcattaattgttcgcttatgggctaattaatttatttaatgtatcaaaactcaagggcagggagtgaacctgctgatacagcctgttgtccatgagatttaagtggtttttgaataattcgaataagtaatattattaatcaaataaacagcttagcaatgtagtgtaatacgtcagaagagacttaatattgtttaatcttgacgagtgagagtcatggcttcctaatatttcccgattattgcactgtgagtagaagaaaaatttaagactaaattcatctgttgagcggttaatgtgaagggaagcccatgatggagggacgcagccttacacatgggcaactaaagatcattcgatattgctatcattacccttccgaatacgaaacagtatagctggctaacccggtgtcatttggtaaagataatttaatttactgttacgaattattttaaattaaattagatgccatttacagtttaaaccataattttttgcctgctattgccataggcctcccactctagactcttctccctgattctcctttctccgcgttatctcactctttgttacctaaattatgcatcaatatcatcttgagtattgaatctgacaacttgatgtgatgttatattgtatcaataatgactcactgatatcttcctatgtgccaatcccatcaccataaagcgtcgctttctgtaccgaatcgaacgctattttcaatttcttcatggctgcgcgcgttcggcatgataaccgtgctgatcttattgtggtcagccatttattgggcgaatgcactgccatgatcactttgcaacagctacaggttggttatgggcagcagccggtcaccgctcctcttaccggctcttttgcccgcggctcgctcaccgcagtgattggcgcaaatggtgccggcaaatccaccttacttaagacattggccggattacagccagcgttaggcggcaaaatagtctttggcgacaagaagattcccagaatggcttatttaccgcagcaagccgaattggatcgccaattccctattatcgtgttcgatgtagtagcaatgggatgctggccacaaagtgggatgtttggtggcctgaatcgacaatcggtacaacgcatcaagcaggctttggacaccgtcggcatgctggatatggccagatgtccggttggggtgttatccggcgggcagttgcagcgggtacttttcgcccggttgttggtacagcaggctcctttattactgctcgatgagccttttaccggcattgataatcagactctctgcttgctattaaacgttatccagcagctccatcaggaagggcgaaccattattgccgttttgcatgatatgtcgatggtagcgcagcattttccacgagtattacagctcaccgctgaatattgtcgctgggatgaatctaaacgcttgtttgccgagtgcgctgaagcaggccgaaacctttccaatcaaaataatctgtctgtggaagcccagccatgaatttgtttcatctattagccgacccttttgtcgatttcggttttatgcgacgagcgttggtggcttgtctggctttgtctttgagcgccgcgccgcttggcgtttttctattgctacgacgaatgagtctggtgggggatgcgctttcccacgcggtattacccggtgcggctattggctacctgatttctggcgtatcgctggttgcgatgggcatcggtggatttatcgctggactggcggtggccatgctatcagggctagtcagccgtaaaacaccgttaaaagaggacgccagtttcgccggtttttatttgggttctctagcacttggcgtcactttggtttcattacgcggctccagcatggatttattgcatgtgttattcggttcgattctggctattgattccgccgcgatgaccatggtgggcgctatcgcgaccctttcgctgttagtactggcgttgatttatcgagccctggtgattgaatcattcgaccctgtctttctgcgcgtcagtatggggcgttggctgatggtggtgcatggcatttttcttgctttggtcgtggtcaatctggtcgccggtttccagattttaggcaccttgatgtcggtagggttgatgatgttacctgcggccagtgcgcgtttttgggccaaggatttacctcatactttagctttttcggtgctgatcggcatgatttccagcgttgtaggcttgatttggtcttactacgcttcactgcccgccgggccggctattgtgcttagcgccagtattattttctttatttcgattttgtttggctcgcgcggcggcatttgggccgtggcgcgggattagaagtgtgtgctttaaaggagaattaaatgaagcgtttacctatcgcgttggcggtcgctgccctgctgtccagcccgctggctatggccaaaactatcgaagccgtcgccagtttttctattctaggagatattgtgcagcaaatcggtggtgagcatgtgaaagtcaccacgctagtggggccggacggcgatccgcacagtttttccccctcgcctaaagatagcaaacagatttctcaggctgacgtggtatttgtcagcgggctgggtctggaaggttggttgaatcgtcttattgcggcctctggctataaagggccggtggtgacgctttcagagggtattcattcacggaaaatggaggaggaggggaaaaaagtgaccgaccctcacgcctggaacagtatgcaaaatggtattcaatatgccacgcatgtgatgaatgctttaatcgttgccgatcctgaggacgcggattattaccgtaaacatggtgcagaatatatccagaaattggaaaaactggatgcctatgctaaagcccagtttgccagtattcccgttgaaaaacgcaaagtactgaccagccatgatgcttttggttattttggacaggaatatggcgtcacctttttggcacccgttggtttttccactgaagccgaggccagcgccagcgacgtggccaatttgattaagcaaatcaaacaggaaaaggtaaaaacctattttattgagaatcaaaccgatccgcgtttagtgaagcagattgctgcagccagcggggcggaggccggaggcgaattgtttcctgaagcgctatctcagaaaactggcccggcagctacctatgcggaagcgttcaaacataatgtcgatactatcgtcgccagtatgaaataactattttcccctgtctgcaacgggcaggggggcgacaacacttctaaaagcacggcatagtgagttttacggtaaagaaaaagccccgttgggcagcaacgaggctttttatctacaggcaacaagcaaaatacaagttggtaaatcggacttaacgtttctttttagttcctccctgaaccgctttgaagcgcggattgcttttacaaataacaaagactcgtccgtggcgacggacaatcttgcagtctggatgacggttttttgctgaacgtaatgaactaagcacttgcatgatgcattcccagatcagttattttttttgaaaaaatggccaaaacgctgctggaagcgcgcggtgctaccttctttggagaattctttttgtttccctgtgtaataaggatgggaagcggaagagatatccaaagtgacgtaaggataggtttggccttcgaattcgatcgtgcgttcggtggctatggtcgaacctacggtgaagtaaacgttggcgctggtgtcgtgaaagactacggtgcgataggtagggtgaataccggctctcataataaccttctatgtaatgttataatataacaataattatgcgccgagaaataagcggtttcaagccaaaaatgcaaacaatggaaaaatgatgatggatgaggcgatcgtcagacctgtgcttaagaaggggatcgatgaaaatttagtgaaatgccaggcaagaaaaaggccgcttgcgcggccttttacagagtgttatcgcaggttaagcattacttaacctgatgatcaaccgaatgactatgttcaatatcctcattcttcttgctgaaacggcggcgaaccaccacgaagaacactggaacaaagaagatcgccagtacggttgcggttaccatcccgcccattacgccagtacctaccgcgttctgagcgcctgaacctgcaccactgctgataaccagcggcattaccccgaggataaaggccagtgaggtcatcagaatcggacgcagacgcatacgaaccgcttccaacgtagattcgatcagccctttaccttctttctccattaagtccttggcgaactcaacgatcaagatggcgtttttggccgacaagcctatggttgtcaacaggcccacctggaagtaaacgtcgttgtttaatccacgcagagaagcggcgagtaacgccccgactacgcccagcggaaccaccagcataacggagaacggaattgaccagctctcgtatagtgcggccagacacaggaataccacaatcagtgagatggcatacagcgccggagcctggttaccagacagacgttcctgataggacataccggtccagtcatagccgataccgcttggcaatttagacgccagttgctccatcagatccatcgcttcaccggtacttttacccggtgcagcctgacccaaaatttccattgatggcaaaccgttataacgttccagacgcggtgaaccatactcccacttcgcagtagagaaggtggcaaacgacaccatttcacccgcgttgttgcggacataccacttatcgatatcgctcggtaacatacggaacggcgcatctgcctgtacgtaaactttcttcacacgaccgcggtcgataaagtcgttcacgtagctcccccccatggcggaaccgagtgtggtattgatgtcggaaatagccacgccgagggcctgtgctttttcctgatcaacttccactttgaactgaggtgtatcttctaaaccatttggacgcatgcctaccagcatgtctgaatgctgagccgccatacctaacagctggttacgtgccgcagtcagtttttcatgccccaggttaccctggtcaatcagttggaagtcaaagccggtcgcagtacctaactcgacaatcgccggtaggttaaaggcgaataccaaaccgtctttgatttgcgagaaggcgtgagatgcgcggccaacgatagccggtaccttattctcctcgccctgacgttcgtcccagtttttcaggctgacgaacgccaaaccggtattttgcccctgtccgctgaaaccgaagccgttaacggtaaagaccgagttaactacgtctttttctttgtccagatagtaatccgtcacgtggtctagcactttctgggtacgctcttgcgtagcacctgccggtagctgaaccatggtcaggaatacgccctgatcttcttccggtaggaatgatgttggcaggcgcaggaacaacacgcccataccgataacaatcgccagatagatcaccagataacggccggtactgcgcaggatattagctacgctgtcggtgtaatggtgggtgctcttttcgaacatccggttaaaccaaccgaagaaaccggttttcgggccgtgtgaacctttaggaataggtttcaacatagtggcgcacagtgccggtgtcagaatcaacgccaccagaaccgacagcaccatggcagaaacgatggtaatagagaactgacggtaaatcgcaccggtagaaccaccgaagaaggccatcgggatgaataccgcagaaagcaccatcgcgatccccaccaatgcgccctggatctgctccatggatttcttggtggcttctttcggcggtagcccttcctcttgcatcacacgttcgacgttctctactacaacgatggcgtcatccaccaatagccctatcgccaacaccatcccgaacatcgttagcgtgtttatcgaatagccaaaggcggaaagaatggcgaacgtccccaacagcaccacaggtacggcgatggttgggatcagggtagcccggaagttctgtaggaacagatacataaccaggaataccagaatgatcgcttcgaccagcgttttcaccacttcgttgatggaaatcttaacgaatggcgtggtgtcgtacgggtaaactacttttagaccggctgggaagaacggttgcagcttggccagttcggcttttactgccgccgaagtgttcagggcgttagccccggtagccagtttgataccgatacctgccgcaggtttaccgttgaaacgagcgataacgctgtagctttccgctcccaatttgacgattgcgacgtctttcaggcgaacctgagagccgtcggtgttcactttcagcaagatctggctgaattcttccgcagaggtcaaacgggtttgcgcaataatagacgagttaagctgctggcccggcactggcggtgtaccaccaagctggcctgctgccacctgattattctgcactttaatcgcattgataacgtcaaccggcgtcagcttgtagttgttcagcttgtgtggatccatccaaatacgcatcgcatattgggaaccgaacagctgaacgtcacccacgccggaggtacggctgataggatctttaatgttcgaacctacgtagtcggcgatatcttcctgctgcatggtgccatcttcggaaataaagccggcaaccattaagaagctgctgctggatttctcgacgctaacgccttgctgttgtacttcttgcggtaacagcggcatggccagttgcagtttgttctgcacctgaacctgcgcgatatccggatcggtaccttcgttaaaggtcagagtgatctgtacgctaccggacgagtcgctgctggaagacatatacagcaagccatcgatgccgttcatgttctgttcgataacctgagttaccgtattctgaactgtggtcgcatcggcgcctggatagttggcagagatcgaaattgccggtggcgcaatggtcggatattgcgctacgggcagtttcattatcgcaagtgcgcccgccaacataatgataatggcgataacccatgcgaatatggggcgatctataaagtacttagccatgaattaccggctccttttaagacttcttcgcttgttcagccggtgctgctgccggtgcggcgtcagagacttcctgcgccttcacctgcacgcccggtttgattttctgtaagccggttacaatcacgcgatcgcccggtttcaagccgtcggtaatcagccatttatcgccgattgcctgagccgcagttaccgtgcgcagttctactttgtcaccttcgcccacgaccatcgcggtggcttcaccacgcgggttacgggtaataccctgctgaggaaccagcagcgcatctgctctcacaccttcatcaagacgggcgcggacgaacattcccggtaacaatgactcgttcgggttagggaagatggcacgaatcgtaatggaacctgtggtttcatccacggttacgccggagaattccagcgtcccggtttcagaatattcagtgccgttttccaataacaggcgcactttcgctttgccgttttcctgtttcatgacgccgctggccagttctttcttcaggcgcaggaattcatcactggactgcgtcacgtccacatacattggatcgagctgctgaacggtggttaatgcggtggcctgagcgctgctaaccagagcgccttcggttaccgaagatttaccggtacgacctgaaattggcgaagttaccttggtgtaagccagattaatacgtgcgctttccagcgcagcttttgcgctttgtactgccgcattggcctgcatcaggttagaggtcgcggtatcgtaatcttgtttactgatgtagttggtgcctaacagaggtttgtaacggttaacggtcaaacgcgcaatttccgcgctggcctgtgctttggctaaatcgcctttggcgctgtcataagcggcctgataggtcgccgggtcaatttgatatagcgatgttccggcggtaacgtcactgccttcaacataattacgtttaagaataatgccactaacttgaggacgaacctcagcaatacggaaagcagacgtccgccccggaagctcagtagtaatattgagaggttgagctttcaatgtcacgataccaacttcaggggcttgttgtgcctgggcgccttgcgctgcatctttatcattacatcctataagtactaagctgcctgaaagtaccagaattgcagccagaggcattacccctctgtttttgctcatagataaacctcaagtgtccgatttttaattaaccaatggatcacaagctctaaaacccattgctgcgaaaatgatatgtgcgtgctatggtacatacattcgcaaatgtatgtaaatcacagccccccgaaaaaacaacgccatggcacgaaaaaccaaacagcaggcccttgagacccggcaacaaattcttgatgccgccgtgagagaattttctgaacatggtgtttcaggaacctcactcgcggatattgctgacgctgcgggtgttacccgtggtgctatttattggcatttcaaaaacaaggtcgatctgtttaatgaagtctggtcgttatcggaatttgacatcgatgaactcgaactagagtatcaggcaaaatatcccgataatccactgcgtatcctacgagaaatcctgatttatattctggtcgctacgaaagaagactgccgacgtcgtgctttgatggaaattgtgttccacaaatgcgaatttgtcggggagatgacctcagtccatgacgcaagaaaagtcctctatctggcaagttatgagcgaattgaagccgttttgcaagactgtatcgcagcaaaacagctacctgccgatttgaatacccgctgtgcggcgatcattatgcgcgcctatattaccggcctgatggaaaattggttatttaccccagaatgttttgatatccaacaggatgcagcggtattaattgatacctatctggaaatgatttcacggtgccaaaccctgcgaggggaaggcgcttcagcgaaataagattaacgtgaggtaaatatgagttctttggtcgttattgccaacggtgctgcctatggtcatgagtcattatttaacgcactacgcttatccattgcgctaaaagatcagcagcccgatttagatcttcggttatttctgatgtccgatgcggtaactgccgctatgaccggacaaaagccacatgagggatacaacattcagcagatgctggagattctcagcgcccagttggttcctatcaaactgtgtaaaacctgtgctgatgcgcgcggaattagcgcgttgacgcttattgaaggcattgaaattgggactttggtcgaactggcgcagtggacgctggcggcagagaaagtgttaaccttctaattctcaggctgatagggcggttttcagccccgtaggccgttttttatgcaatgaagaatttttcttatgatcggcgttggccgaacgtggtaggatttctattatctccgctgatatgaagttagatcatgattcgctggttcaatacccaatcgtctctgcttttcaataataccgacagcaataccaacagcgcacccttgcttcgtgtctggatgctttttagtctgcttattctggcgctggtgtgtttgcctgcggctaacgcggcgaacttaaatggcgacgtgccgagccgtagtgaagtacaaaatcagctcgatgttctggcgaagctgaaaactccgacgccagccgacaaactggctcagcaagatttggtgcaaacgctggaatacctcgacgccattgagcgggttaagcaggaaaccaaccagcttaagcagcaattggctcaggcaccggctaaactgcgccaggcgaccgatgcgctggaagtgctgaaaagcaactcctccgattcgctgactcgtgaatcactagcgaactattctttacgtcaattggaatcccggctaaatgaaacgctggatgacctacaggcggctcaggaagatctttccacttacaatagccaattgatttccctacaaacccaacctgaacgtgtacaaagcgccatgtatagcgcttcccagcggctacagcaaatccgtaatttactcaatggattagcgccgggacaggatggtttacgtcctacgcaacagcaaatgctgttaactgaacaggtgttgttgaatgcgcagttggacttacaacgtagaaatctggaagccaacactacgttgcaggatttactgcaaaagcagcgggattataccaatgctcatattggccaactggaacgtaacatccaaacgcttcaagaggttgtcagtggtaagcggctgattctttccgaaaaaacggctaaagaagcccaggttccggatgattctaccgacattcaaaacgatccgctggtcagccgcgaactggcgattaatcgcgatttaagccagcgtttgatcaatgccaccaaagaaggcaatacgctggttcagcaaaatattcgtgtgaaaaactggctggatcgtgcattgcagtctgaacgcaatttaaaagaacaaattaccgtattgcgaggtagcctgctgttatctcgtattttgtatcaacaacagcttagcttaccgaccgatggcctgattagcgatatggggacgcgcattgctgacctgcgtttggaacagtttgaaattaatcaacagcgggatcagctcttccagggcgatgattatattcaaaaggtgatgagcgacagtaaagaaaaagtcagtggcgaagtggaagatgcgctggggcaaattgtcgatattcgccgtgagctgttggatcaattgaataaacagttgggtaaccaactgacattggcgattaatctgcaaataaatcagcagcaattactcagcgtcaacagctcactgcaacatactttaacgcaacaaatcttttgggtgagtagcaataaaccgatggattggtcgtggttgaaaagcttgcccgaggcgattcacagtgagttgagcaatcttcatttcaaattttcccctagcgatattctggcgggattactgaaatctttgatttttgtgattccggggttgctgctggtcggcgtgattcgctggcgctataaaatcatagataaccatctggatagtctggcgaacgatgttggtcagctaaaacacgatacgcagatgcatacgccgaaggcgattttgctcattttattaaaggtattgccgggtgtggtgctgattctgcttgtaggctattggtgccttcaatcggagatggcgattagtgatttcctctggagcttcttccagcaattggccttgttctggctgatattcgatttgacctaccgcatgttgtccccaggggggattaccgaacgtcacttcaatattgccgctgagcgctgcgcgcattaccgtcggcaaatggtacgtttgggcgtagcgctgctgccggtgattttctggtcggtattgggcgagaaaagtcctctacggctggtggatgatgttatcggtcaggtggtagtggtgattgcgttagcgctgctagcggtatttgttttcccattctgtcgtgatagctggcgtgagaaaaacagccacgcggtgcgattggtgatagtgactgccattgcggtgacgccggtgattctgattggcctgatggctgcgggttatttctatactacgctgcgtctggccgggcgttggattgacagtatctatctattcttcctgtggaatatcgtttatctgaccgcgattcgaggcttaggcgttgccgcccgccgtttggcttaccgacgcgccattgctcgtcgccagagtttggcgaaagaaggggcggaagggagtgagccggtagaggagccgccgctggcgttggatcaaattaaccagcagtcattacgtttgaccacgatggtgctgttcctgatttttgctacggcgttttactggatatggtcggatttagtcacggttatctcctatctggacagtatcactctgtggcattacaacagcacggttgccggtgccaatgtgcagcaggcggtgacgctgggtaatattctggtggggattatggcgctggtggtggcttatgtcatgacccgcaacctgccaggattgctggaagtgctggtattatctcgcttgcagctgcgtcagggcacgtcctacgccataaccactatgctcacttatctgattacctcggtcggggctattaccgccttaagttctctcggcgtttcgtgggataagctgcaatttctggtcgcggcgctaacggtgggtctgggatttggtttgcaggaaatcttcgctaactttgtgtccggtatcattatcttgttcgaacgtccggtgcgtatcggtgatacggtgactatcggcactttctccggtacggttagcaaaattcgtatccgcgccaccaccatcaccgattttgatcggaaagaagtgatcatcccaaacaaagcctttgttaccgagcgcttaatcaactggtcgctgtcggatacgattacccgtattctgattaaagttggcgtggcctatggctctgatttagataaagttaaagaagttcttctgaaagccgctcatgataatccgagagttatgtccgatccggaaccgcaggtgtttttcctcaatttcggtgccagtacactcgatcatgaattgcggttgtatgtacgtgaactgcgcgatcgtagttacaccgtggatgagttaaaccgcgcgattgataagctttgtcgcgaaaacgacatcaatattgcgttcaatcagcttgaggtttatctgcataaagaagatggggcagaagtgcaggaagtcagccgtcctattaatttgatgccggataacgagcggaaacaactgcagccttagtttgaaacgggttttggatcggaaaaactaattggaaaacccataaatgctgagggcgaagccggagaggtttcgccctttttggggcagcgttgtaagccgtagtcaggcagggaattattcctgacggtgatgactcagcttttgctgatagtcacgcttaacaatttccagcgctgccagcgccgtttctggcgcaatttcgttgcattccagcaggtaaatcaaatctaccgctagctgcaattctggtggggcgtgttcaactgacatatgagccaacattagggtttcagtttgagtgaagaaaatccaacgtgacaccaaaaacaatctggtgcagttatatccgtgccgtcaatgcgaatgccggcagaactgacaaatcgataagctgcattatcccgcataatccggtggcatagtgaggaagccggccagcctcagagacgtaaatatatgcgtaatgaatcaactttgaatgcatgctagctaatcagaatattattatagataataaatttaaaccaaataatcatcatttatgcaaatgtgacccgccttcaaaaaccattatcttttctctcgatactgcgctcgattcgcgtcaaagcctgacgacaacgcattaatcggccttccagcgccgccagttccttctggattcgctgctgatccaccagacgggtttgttgtcccaactgactttcacgatcttgaatcatagtgatgatccgtctttcataatcctgatgctctgccagtttatggtacggatcctggctaacctgtcgtggtttgggctgatttttacgtagggtttgagtcgcgagctctcgctgtaaagctgaaatctgcgccaccagcttttctgccaaaaaagccacctgttcggagcgctgttcggcgacgacttgcttcaattgtgtcagattcttgcgaacctccagcagataatcccgcaaacgcgtgccgtggttactgaaaagaagctgatcaaaacgagcctgagccgtaggcgtgtgcgcctgtggggcgatttcagccgacagtgcttcaacctggctttcaagcacctgtaacaatttttctgtgctcatggaattctctcctgatattcttggggctagcttgcctttgaacccgccgggaaacaaggaataaggactggtttgggtaaattgaatcatgaatcgactggtggtgaatctggttaatgataaagtaccggttagtatctttttcaatgatggtgagaataaataaagggagcttatgtctcgttggttgttaatcatcctgggatggaccgccgtggtcttggctaccttaggcgtggtattaccgttgttacccaccacaccatttttgctattagccgcttggtgtttcgctcgctcatcgccgcgttttcatcagtggctactctatcgttcatggtttggcagctatattcgcaactggcagcaacatcgggcgctgccaccgggagccaagtggaaagcggtactggtgacgcttatcactttttccatatccctgtggctggttaaaatctggtgggtaagaatgctgttagcaattatgcttatcgttttattgattttcatgctgcggatgccggttattgacctaacgcaacaaaaaaagcgctgattatctggctccggttgcatttttccatcagtttgaatagatttgagcgttttcgtgcgcggattgccccatagtccctgtttagggcgttaaaaggggtggatgtgttctgtcccggcggtgtttgatcgacatcgggtggccgcgttttagtatgttcagcagttttatcaggcacaaattatgaccgctaccgcacctaatacagcacaacagcttcagtatattaaagacagtattgaaaccatccctgactatccaaaaccgggcatactgttccgcgatgttaccagcctgttggataatcctttggcttacgcttccagtatcgaactgctggtagaacgctatctggacgctggcgtgaccaaagttgtaggtaccgaagcccgtggcttcctgttcggcgcgccggttgcattggctctgggcgtaggttttgttccagtccgtaagcccggcaagctgccgcgcgaaaccattagcgaaagctatgaactggaatacggcaccgataagctggaaattcacaccgatagcattaaaccaggtgataaagttctggttatcgacgatctgttagcgaccggcggaaccattgaagcgacggctaaattgattcaccgtttgaaaggtgaagtggttgctgcggcatttattatcaatcttccagagctgggcggtgaaaaacgcctgacggaacaaggtattgattgctacagtctggtctctttcgacggtcattaatttgaccatgccttttggcaatcggtaaaaaaaggcctcgttactgaaatagcacgaggcccagttaattctctattgctgtctgaatgatcacagtctgactgcactttcagctaaccatattttctgttaacaatattctcggttaacaatactcgctgcgaataacactgcatctgacgattacacattagcatttgccggtgatttctgtcgacgtttacgccaacgccttaatataaaaggcaatatcaatactgccacagccagaccgagtaaggtttgggcgattgcaccctgccataagatactgaaatctccgttactgatggaaagcgcgcgccgtaaattctgctcaagcatttctcccagaacaaagcctaaaatcagcggtgacatcgggaagttcatttttcgcagcagatagccaaagacgcccagtccaaccatcaagaccagatcaaatgtggtgctgtgtaccgcatagaccccgactgcagaaacggcggcgatcgccggcactagaaaccataggggaatggtgagcattcgggtgaaaaaaccgaccaatggcagattcatcaacagcaacatcacgttggcaatcagtagcgaagcaatcaatccccagacgatgtccggctgctcggtaaacatggctggccccggcgtgatgttatacagcgtcaatgcgcccatcatcaccgccgtggtgcctgaaccgggcacgcctagcgtcagcattgggataaacgaaccgcaggccgaggcattgttggccgcttccggtgccgccacgccgcgaatatctcctttgccgaagctttcgctattgccgctgatttttttctccgtcatgtaagtcagcgcgctggcaatggtagcaccggctccgggcaggatccccacgaagaaaccaatcactgaagaacgcagggttggccccacgcattccgccgcctctttacggttaaataacagacggccggtttttcgcaccagtttttgcccggtactggtgccttctagcatcagcaaaatttcgctgaccgagaacagaccaatcaccaccacgataaactgaatgccgtcagagagatggacgctgtcaaaggtgaatcgatataccccggtgttggcatcgacgcccaccgttgccagccccaaaccgattaatgctgccaatagtgatttaatcggattctggctcatcatgctgcccaggcaagcgatggcgaacaccatcagtgcaaaatactctgccggaccgaatgagagcgaccattgcgccagcaacggtgcaaatagaataatgccaccaatggcaatgattgaaccgacgaaggaacttaccgctgagatagacagcgcaatgcctgcgcgcccttgctgcgccatgggatagccgtcgagcgcggtcataatcgccgccgcatcgccggggacattcagcaatatcgaggagatacgtccgccgtattcacagccgatataaaccgttgccagtaaaatcagggcagattctgctggcagctttaaggcaaacgccagcggcagtaaaatcgccacgccattgattggcccaagaccgggtagcaggccaacgatggtgccgataaagcaaccaatcagggcaatcatcaggttttgtggcactaatgccacttcaaacccttgggataaatacatccaggtttccattattgcctcgttagttcagccaaacgccgagcggtagggtgacatccagtaagtggtcaaaggcataaaataaagcaataccgataaccaccgccgatagcagcgcctgaatcaggctggcctggaacaacagcgctatgctgaaggtcaacaaagccgtagcgagtggaaatccgagccattcaaaaccccagccatacagcaccagcgtaatgatcatcaccagcaaacgctgtaatactttactgtgcggccaggaaacggtttccggcttgcgcagcagtaatagcactgcacacagggtcattaacgccagaatagcgatagggaaaggccttggccccagtggttcatagctgtattcgctttgaattccccagccgataaacaagccgctgacgcacagcagaatccagataccggcaaaaatgcggtcgctcatcatctacctccgattacttagctaaaccaaaggctttggcttgttcacgatattgttcaacctgatttttgacgtaagtatccaatgctttgccgcttagattgaattcaaacagcccacgcaagtcgcgctgctttttaaactcttcggtttgagtcaaggtgttaaaggtgttaatccaccattggtattcttcttcagtcacttttggccctaaatagaaaccgcgaataattggccacaccagattgaagccttgctcttttgccgtaggaatatcagccagttggccgggcagacgctgttcggaatacaccgccagcacgcgcagtttgtcaccgcttaaataaggcaccatttcgcttaaatcgccggaaactgcctgaatatggttacccagcagcgccgttaccggctcgccgccgccttcaaaagcgacgtagcgcattttgtgaggatcaacgccgacttcgcgcgccagcaacgcggttttcatccaatcctgacttccaatggatgctccggcaccaaataccacgctgtttggatctttcttgaacgcatccatcagatctttcagcgttttatatggagagtcgctgcgtaccgcgatcatgccgtaatcggtgccaaccgcggccagccacttcacgtcattcgcgttataacggccgaatttgttttgcgacagattcagcagcgagccgccggaaaatgccacgacggtgccgaattccgccggacgctgcgccactatggcgttataggccacagcgccaacaccgccaggcatgtaggtgacgcgcatcgggcggtcaatggctttggtttcctgtagggaaacctgaatcaatttacaggttaaatcaaagccgccgccgggcttggcgggagcaatacattcggtgcgcttcggtggatctatcgccaaaacttgttgtgcggctaacatcaggacggaagcggtgagagcacgggtaattatatttttcatagcgattcctaagttattttcttacaaactgtgagccttcccgcgattgcgaggttgctgaattgttaaaacaataacctttcagttacctttcaacggtcaggaaaaagtacaggatgtgatatgcgtctcttgttggtagaagatcatcccgaattatcccattggttacagaaggctttgactcacgcggggtttgccgtggatatcgcccatgatggaattgaagccgagcatttgctgcaaaacgaaagctacgctttagtcgttttggacgtggccttgccgcgcttgaatggattagaggtcttggcccggttacgtaaacgtggacaaactttgccagtattattgctgacggcgcgcaccgaggtagcggatcgggtaaaaggtctcaatctgggcgcagatgattatctcaccaagccttttgaactcgacgaactggaggctcgcattcgcgctttactgcgtcgcagcgtgggcgtgactcagcaagctctgcaatttggttctctgacttatcacgatgagggatattttttactggacgataaacccttggcgctgacgcctcgagagcttgcggtattgaccacactgatgcatcgccgtgggcggccagtggcaaaacagcaattatttgagcaggtttttaccttgtcggaggaagctaacccggaaagtattgagctgtatgttcatcgagtgcgtaaaaagttgctggggagcgatgtgtcgatcatgacattgcgcgggttaggatacagtctggaatgcgaacatgggcagggctaaaggcgctggcctgacaacgtctcgttcgttattccatcaattattggtgtttttcgctctacctttactgattctcggcggcctttcgatttatacccattatatcagtgcgatgaatgcggcaacgctggcttacgatcgctcgctgttagcctcggccagaaccgtcgcggaacggctggtagtgagaaacggccgtttggaagtggatgtgccttacattgtcctggatagtttcgaacgtaacatgaatgatcagctttattatcaggtcattacgccggaaggcaaaagcattgccggttacgatgatttaccgccgctaccgcccaatacgccgcgctcgaatctttatcccgcattggtacatttttatgatgctcattatgacggaaagccgattcgtgtggctgcgctgtatcagccggttaacgaagagggcgtaatggggatggtgatggtgctcgtggccgaaacgctggcatcgcggcataatctggcgcagcaaattatggtctctgcggtgctcactcagggggctttagtgttattcacgctggctatggcttatctgctgttgaagcgaattcttaagccgctacgtaaactctccagcctgatgttactgcgcgatcccggtgagttaacgccactgcctaaaattctcccctggtctgaaatggcgccgttgctgctggcatttaaccgctatatccagcggctgcgggaaatggttgagcggcagggacgattcagcgccgatgcttctcaccagctgcgcacgcctctggcggtgctgaaaacgcaggctgcggtggctctggctagcaacgaaccggctcagtggcgtgaaagcctacaggcgatgaaacacactctagataacacggtggcgctaactgaccgtctgttgcagctttcccgcgttaaagtggtagagcgaactctgcaacctgttaatctctctcaattattgcgggacgcttgttttgcccgtgtgccgcaggcgcgtagcaagcatattgatttgggttatgaaagtgatggggagtaccgaattgcaggggatgggctgctgctggccgaactgtgcgataacctgttggataacgccttgaaatacacgccagacggtggaacggtcactgcacgcttgcatcaggatcagcatattgatcactgtattttggaaattgaggacagtggccccggtattgccgataacgaaactgaacaggcgcttatcccatttcaccgtttggataacgttggcgaacagtccggagccggtctggggttagcgttagtcaaagatattgccatctaccatcaaagccatccggagcttctgaccgggggaaatctgggcggactgctggtacgtatccgttttcatttattggctcaatctattggtaagcctaatgattaataaaatcgctgtatcaggttttcaataactgtgtgctgcgagcggagaagggtgtgcagctcagtcaggcttaaatcgctgaaatatgatgttcaaagtaataggaatgacaatcaacgtactggtacagtatagtgatagatgatatgggtataactttgatggtgtcgataggttatatcttggtagtaaaggtgaatgaaaacaatccagtatgaaatataagcggtaacggtgtttttgttttttctgtataaatggtcttctcaatctcagcgatgaagtattaatgagctatcaggtccttgcccgcaagtggcgtccccaaacttttgctgaagttgttggtcaggaacatgttctgacagcgctggctaatggcctttcgttaggacggattcatcacgcctatcttttctccggtactcgcggtgtcggtaagacctctattgctcgtttattggcaaaagggctgaactgcgaaaccggtattaccgccacgccatgtggcaaatgcgccaactgcctggaaattgagcaggggcgtttcgtcgatctgatcgagatcgatgccgcttcgcgcaccaaagtggaagatacgcgcgaactgctggataacgtgcaatatgcgccagcgcgtggccgctttaaagtttatctaatcgatgaagtgcacatgctttcccgccacagtttcaacgccctgttgaaaacgctggaagagccgccttcacacgtaaaattcctgctggcgacgacggacccgcagaaattaccggtgacaattctttcccgctgcctgcaatttcatctgaaagcgctgtatgtggaacaaattcgtgctcagcttgaaaaagtgcttcaggctgagcaaatcgacagcgatgctcgcgcgttacaactactggcgcgtgcggccgatggcagtatgcgtgatgctctgagcctgaccgatcaggcggtctctatgggccaggggcaggtgaccaccgcgacggtcagccagatgctgggaaccttggatgatgaacagccgctggcgatcatcgaagcgctggtgagcgccgatggtgcgcgggtgatggcgcagatagaacaggcggcgtcacgcggtgtagattgggaaaacctgttggttgaaacgctcagtctgttacatcgcattgcaatgattcaattgctgccatccatgctggataatcattacgcagaaatagaaccgcgtttacgtgaactggcgcgtactttgccgccaacggatattcagctgtattaccagacattgctggtggggcgtaaagagctagcttatgcgccggatcgccgtatgggtgttgaaatgacgctgttacgcgctctggctttccacccaaaagcggttatcgcggagccggaagttgttccacagattccctctccgatcggtgcgccgactcatgctataccgcagcgtcacgccgcgccgcagccggtaacgtctacaccagctcggtcagagccaatgccgccagcatcggtgccggaatctaccgctcagctattgcaggcgcgaacccagcttttacgacagcatgggacatccagcccaaaaaagaatgagccggcagcgcctgacaaagcgcggccggcaatctcggctctggagcgattggcttcagtaaccgagcgtagtcagcagcgtcaggctgccaaagccaccgaggcgaaaccgggcaagaaagaggcgtatcgctggaaagcgcaaaacgaacctgaaacgccgccggagccagttgctacgcctaaagcgttacgttcggcgctagaacatgagaaaacgccggagctatcggcaaaattagcggaagaggcgattcttcgcgacccttgggcggcggagataaatcagcttcagatccctaaattggttcagcagttggcgctgaatgcatttaaacaacagatagaaccgggtaatatttgccttcacctgcgttcgtctcagcgccatctgaattcgccgtccgcgcagaaagtgttgacggaagcgttaagtgggttgtacggcagcccggttgaactaagcgtgattgaagacgacaatccggcggagctaacgccgctggaatggcgacaggcaatttatgaagagaagctggcgcaggcgcgtcagtcgattcttacggataagaacattcagactctgcgtcgattctttgatgccgagctggatgaagaaagtatccgacctatttaatcgctgcggtacgtgcatggtgcacagacgcggcccttgctgtgagagaagactatgtttggtaaaggcggtattggcaatttaatgaaacaagcccagcagatgcaggaaaaaatgcagcagatgcaggaagaagtcgccaaattggaagttaccggtgaagctggcgcgggcttggttaaagtgactatcaacggtgcgcataactgccgccgcgttgaaatcgatccaagcctgctggtggaagacgataaagaaatgctggaagatttgattgcggccgcattgaacgacgccgcacgccgcattgatgaaacgcaaaaagagaaaatggcctccgtatccagtggtatgcaactgccaccgggctttaagatgccgttctgatgcaaaccagcccactccttgaaacattaatggagtcactgcgctgtttaccgggcgtaggcccaaaatcggcgcagcgtatggctttccacctgctacagcgggatcgtagcggtggaatgcgtctggctcaggcgctcacccgcgcgatgtcggaaattggccactgcgtcgattgccgtacttttactgagcaagaaagctgtaccatttgcgctaatcctcgccgtcaacaaaacgggcagatttgcgtggtggaaagcccggcggatattcacgccatcgaacaaaccgggcagtttggcgggcgttattttgtcctgatggggcatttatcgccgttggacggtatcggccctgcggatattggtctggatctgttggaacaacgcctcgccagcgaaagtatcagcgaagtcattctggccactaacccaacggtggaaggtgacgcaacggctaactatatcggccagatgtgcggccagtatggcgtattggctagccgaatagcgcatggcgtgccggtgggcggcgagttggaaatggtggacggcaccacgctgtctcactctctggctgggcgacatccgatcaaatattgatcctttttcaggtcaggcggcggtttattattgattatcatatgaataatatcatttgagataatctggccgtcgcccctgcttatgctttttttctctcaaacatcacttttcagacttgaaacacctccttacaacccccatctgatctccatcattcggctatatccgcctgcacagtaatttgcattgaggtaactaatgagtatgaaaggtcaagaaacccgtggttttcagtctgaagtaaaacaactgcttcatttgatgattcactcgctttactccaataaagaaattttcctgcgcgagctgatctcaaatgcttcggatgcggccgataagctgcgtttccgtgcgctttctgcccctgaattatatgaaggtgacggtgaactgcgcgtccgtttgtcttgcgataaagaaaaacgcactctgacactgagtgataacggtatcggtatgagccgcgacgaggtgattgaaaacctcggtactatcgctaagtccggcaccaaagcattcctggaatctattggttccgatcaggctaaagatagccaactgattggtcagttcggcgttggcttctactctgcttttatcgtggcagataaagtcaccgttcgcactcgtgccgcaggtgcaccggcggatgctggtgtgttctgggaatcagaaggcgagggcgattacactatcgctgacatcaccaaagaagatcgcggtactgaaatcaccctgcacctgcgtgaaggggaagatgagtatctggacgattggcgtttgcgctcaattatcagcaagtattccgatcacatcgctctgccggtggaaatcgaaagtaaaaacgaagaagacggcaccgttagctgggaaaaaattaacaaagctcaggcgctgtggacgcggagtaaagccgatgttagcgatgacgaatataaagcgttctacaaacacatcgcccatgattttaccgatccattaatctggagccacaaccgcgtagaaggtaagcaggaatataccagtctgctgtatatcccagcgcaggcgccttgggatctgtggaaccgcgatcataaacacggcttgaaactttatgtgcagcgcgtgtttatcatggacgacgccgaacagtttatgccgaactatctgcggttcgttcgcggcctgatagattctaacgatctgccgctgaacgtatctcgtgagattttgcaggacagtcgtattacccagaatttgcgtagcgctctgagcaaacgcgtactgcaaatgctggaaaaactggcgaaagacgatgtggaacagtaccagaagttctggcaacagttcggtatggtactgaaagaaggcccggcagaagatggcagcaacaaagaaaccattgctaaactgttgcgctttgcttcaacccataccgacagctcggcgcagaccgtttcgctggaagattatgttagccgtatggctgaaggtcaggagaagatttactacattactgccgacagctatgccgctgcgaagaacagcccgcatctggaactgttccgtaagaaaggcattgaggttctgctgttatccgatcgtattgacgaatggatgatgagctacctgactgaattcgatggcaaagccttccagtcagtgagtaaggccgatgaatccttggataaactggttgatgcagaaactccggagcagcaagaagcggaaaaagcactggagcctttcgttgagcgcgttaaaacgctgctgaatgaccgagttaaagacgtacgcttgactcatcgtttgaccgacacgccagccatcgtcaccacaggtgccgatgaaatgagcacacaaatggcaaaattgtttgccgctgcgggtcagcaagcacctgaagtgaaatacatcttcgagctgaacccagaacacgcgttggtaaaacgcgccgcagaagtcagtgatgaaagcctgtttgcggagtgggttgagctgctgctcgatcaggctctgttggcagagcgcgggactttggatgatccaaaccagttcattcgccgtatgaatcagttactgacagcctaatttgcaatgcgattgcccctgaccaaaagctcggttaggggcattttaaccgcacaatcacggcttttctctgccaaatcaattcagttagtctcatttcttcaattacctcctccggcaaggtgccttgagcgatcacccgtggaaatggtatggttacgcgttttctgcattttcgatttcattctagtaaaaacacatagaaaaactacatagcaaggggatttacgcaatgcgtatcattctgctgggcgctccgggcgctggtaaaggaactcaagcgcaattcatcatggagaagtacggtattccgcaaatttccactggcgatatgttgcgcgcagctgttaaagccggttcagaattgggcttaaaagcaaaagaaattatggatgctggcaagctggtgaccgatgagctggttatcgcactggtaaaagagcgtatcactcaagacgattgccgcgacggcttcctgcttgatggtttccctcgtaccattcctcaagctgatgccatgaaagaagccggtattaaggttgactacgtcctggaatttgacgtgccagacgaactgatcgttgatcgcatcgttggtcgtcgtgtccatgctccatctggccgtgtttatcacaccaaattcaacccgcctaaggttgaagataaagatgatattaccggtgaagagttaaccattcgtaaagacgatcaggaagccacggttcgcaaacgtttggttgagtaccatcagcagacggctccgctggtttcttactatcgtaaagaagctgatgcaggcaacacccagtactttaaattagacggaactcgcaaagtttctgaagtaagcgctgaattagctactattttgggctaatatgctgagtagacaaagaaggcggccttgggtcgcctttcttatttatgtattgcagaggtgaagtagcagggagtttatatttatggccgcctcgctataatggcagtaaataaacgcgctgtgtgtcgcgggtttaaatacattgcagcttattagtaaaggaagggaactgactcatgcaaagcaaacttggcgttctgatggtcaatctgggaacgcctgatgccccaacgactccagcgattaagcgttacctggctgagtttctcagcgatcgccgagtagttgatacttcccctttgctttggtggcctttattacgcggtgtcatactgccaatccgctctccgcgagtggctaaactgtatcaatcagtttggatggacgaaggctcgccgctattggtttttagtcgtcggcagcagcaggcgctagcggcccgaatgccggacacaccggtagagcttggaatgagctatggctcacccaatttatccgatgccatagaaaaactgttggcacaaggcgtaactaaactggttgtgttaccgctttatcctcaatattcctgttcgaccagcgctgccgtatgggatagcgttgcacgtattctaaaaaattatcgtcgtttaccttctatcagctttattcgtgactatgcagagcatcctgcttacattgccgcattaaaacaaagcgtagaacggtcttttgagcagcatggtcaacctgaccgtctggtgctctctttccacggaatccctaaacgttacgcacagcttggtgacgactatccgctgcgttgtgaagatacagcccgcgcgcttacggcggttgtgccgctgcccgcagaacagatcatgatgacctaccagtcacgatttggccgcgaaccctggctcactccttatactgatgaaaccttaaaaagcttaccttctcaaggtgttaagcatatacagctgatctgccctggcttttccgctgattgtcttgaaacgctagaggaaattaaagaacaaaatcgtgagattttcctacatgcaggcggcgagaagtttgaatatatccctgcattgaatgatgatattgcgcatattgacttgcttgagttattagttaaacggcacatgtagtgccttgctaaatataagcgctctatatatagagcggcttatgtttagctgaaagtttgatttttaaatactcgaagacatgaagaaaatcaaatgaatacattcggttacgatttattgtgcaaagggcattctccggattttctcgtattatcttagtcaattaaagcgtggcataaatcacgtttttcttgtaatagcggggtattagtacgagaattggcacaaaattttaatgccttaattaaatgaatgtttaacttaaaatgtgtctgctgtttaggaatgctctgagaccgatttaaggccaaagcgcgtaccctcaagccccctgcggggccacagacctaaaccttcgaatcagtgcattggtagctgcaagccaagggcggtagcgtggggattttattctatttatacgacgatgcctttcatggatgaagagatcgctactccatgcattttgttaaaatcattcgctaagattaattcttaaaaagataaaaatcagtgaggcgaattaatttacttatttaaatttatttaattcggatttatatatgtctttagaaattaaattgcatccatccggtgttatttttacttctgatggtactgaaaccattctggatgcggcacttgaaaataatatcaatattgagtacagctgcaaggacggaacctgcggcgcttgtaaggctgttgtgctatcaggcgaggttgagcaaggtgagaatacattcttatccgaagaagatattgctaagggttcaatactaacttgctgttctaaagcaaagtctaatgttgaattagacgttcattattatcctgaacttagccacataaagaaaaagacttatccctgcaaagttgacaatattgagtatcttggcgaagacattgccattttgtcgctaaggcttccacctagcgccaatatggagtatttggctgggcaatatattgatttaataattaatgggcaacgccgtagttattctattgctaacgcgcccggcgggaatgttgagctgcatatacggaaagttgctaatggacttttcagtcatatcatttttaacgaattaaaaccacagcaactcttacgtattgaagggcctcagggaaccttctttgtgcgtgagaataatgaacctattatattccttgccggtggtacaggttttgctcccgttaagtctatggttgaagcattaatttctaaaaatgatcaacgtgaaatgtatatttattggggaatgccgacagggaatagtttttattccgatatcgcaagggaatgggcaattcagtaccccaatattcattatgttcctgtagtctcaggtcatgatgaaagttggactggtgcaactggatttgtacatcagtcagttcttaacgatatcgccgatctcagtctatttaatgtttatgcctgcggttccttagctatgatatctgctgcgcgcgctgattttataaagaatggattaaacgaaaataaatttttctctgatgcctttgtgccatcaaaatagctttgatttgtcaaagtaatacgtaatggagattctagtgaaagcagtcattcttgccggtggtcttgggacccgtcttagtgaagaaaccgtagttaagccaaaaccaatggtagaaattggggggaaaccgatcctctggcacattatgaaactttattcatcctacggaataaatgattttgttatttgctgtggttataaaggctatgtcattaaagagtattttgcgaactactttatgcatatgtccgatattacattctgcatgcgtgataatgaaatgacggtgcaccaaaaacgcgtcgagccttggaatgttactttggttgataccggtgagaattcaatgactggtggccgcttacgtcgagtaaaagattacgttaaagacgatgaagccttttgcttcacctatggtgatggtgtcagcgacgtgaatatcgcggaattgattaaattccataaaaatcacggtaagcaagcgaccttaactgccacttatccgccaggccgtttcggtgctttagacatcaaagataaacaggttcgtagctttaaagagaagcctaaaggtgacggcgctttaattaacggtggctactttgtcctgtctcctaaagttattgatctaattgatggcgataactcaacttgggagcaagaaccattaatgaccctggctgagcagggcgaactgatggcttttgagcatacaggtttctggcagccaatggatacactgcgtgacaagctctacctacatgaactgtgggaagaaggacgcgcaccttggaaggtatgggaataaaaaatgattgatgcaagcttctggcaaggtaaacgtgtttttgtaacaggtcataccgggtttaaaggtggatggctgagtttgtggttgcagaacatgggggcaacggttaaaggttattctctggctgcgccaactgaacctagcctatttgaaactgcccgcgtagctgacgggatggaatcagaaatcggtgatattcgcgatcaacaaaaactattaaactcaattcgtgaatttcagccagaaatcgttttccatatggcggctcaaccgctggtaagactatcctactcggaacccgttgaaacatactcaactaatgttatgggcaccgtctatttactggaagcaatccgtcaagttggtggcatcaaagctgtggttaatatcaccagcgataaatgctatgacaataaagaatggatatggggctatcgcgaaaatgaagcgatgggaggatatgacccatattccaacagtaaaggttgcgctgagttagtcacatcttcttatcgtaactctttctttaatccagccaagtacgatcagcatggtacagcactggctactgtccgcgccggcaatgttatcggcggcggcgattgggctttggaccgtattgttccggacattttacgtgctttcgaagagtcaaaacctgttattatccgcaatcctcacgccattcgtccttggcagcatgtgcttgaaccgttgtccggttatattttactggcgcaaaagttgtacaacggcggcgtagaatatgccgaaggctggaactttggtccgaatgaagcagatgctactccggttcaaaatattgttgaaaaaatggtcgaattttggggtgatgatgcaagttggcaattggatggtaatgaacatccgcacgaagctcactatttaaagttagattgttcaaaagctaaaatgcaacttggctggcacccacgttggagccttaacaccacgctggaatatattgtggcctggcataaagcctggctagccggcaaagacatgcatgaatatagtgttaccgaaattaataattacatgaaaactagatgatttgaggtcatagaaaatgagtcaagaagaattacgtcaacagattgctgggctagttgctcagtacgctgaaacggctatggcccctaagccatttgaagcaggtaaaagtgtcgttccaccttcaggtaaagttattggtgctaaagaacttcagctgatggttgaagcatctttggatgggtggttaaccaccggtcgttttaatgatgcttttgagaaaaaactgggggaatatctcggtgttccttatgtactgacaaccacgtcaggatcttcggctaacctgctagcgcttactgcgctgacctcgccaaaacttggtgcacgagcgttgaagccaggcgatgaagtgattactgttgctgctggtttccctactacagttaaccctaccattcagaatggcttaattcctgtcttcgttgatgttgatattccaacttataatgtgaacgccagcctgatcgaagcagctgtcagtgataaaactaaagccattatgattgctcatacgctgggtaatttatttgatctggctgaagttcgccgtgtagcggataaatataacctttggcttattgaagattgctgtgatgcattaggttcaacctatgatggcaaaatggcgggtacatttggtgatattggtaccgttagtttctaccctgctcaccatattactatgggtgagggtggggcggtatttaccaaatcagcagaactgaagagtattattgaatccttccgtgactggggccgtgactgctattgcgcaccaggctgtgataacacctgtaaaaaacgctttggccaacaactaggttctctaccattcggttatgaccataaatatacctattctcacttaggttataaccttaaaattacggatatgcaggctgcctgtggtttagctcagcttgaaagcgtagaagaatttgtagaaaagcgtaaagccaattttaaatacctaaaaagtgctttgcagtcttgtgagcaattcctcgagctgccggaagccacaccaaactcagatccatcttggttcggtttcccaataacgcttaaagaagacagcggtgtaacccgtatcgatttggttaaattcttagatgaagccaaaattggtacacgtttactgttcgctggaaacttaacgcgccagccgtatttccacgacgtgaagtatcgtgttgtcggtgagttgactaatacagaccgtattatgaatcaaaccttctggatcggtatttatccaggcctgacacatgatcatctggattacgtagttagtaagtttgaagaattctttggtttgaatttctaataggagtcaggaggcaactattgcctccttttaatatgaagatacttattaccggtattagtggctatctcggtagtcaattagcaaattcgttaatcgatgaacatgagatagcaggaactattcgtgaaaactcttcatataagcggttgaataatccggataaaattagattaattgatctatctgaaatggattggttattgaaaataaacgattttgatccggatattgtcatcaatactgctgcattatatggccgtaatggtgagccgctttctcagttagtacaggctaatgtccagtttccgttgctaattttagagatgctttcttctaatggttctggtgttttcctaaattgtggaacatccttaccttcgaatgttagtgattatgcattaactaaaaatcaatttagcgaattggcgaaaaagtatagtgatagatttaccgggaagtttatagatttaaagttagagcatttttatggcccttatgatgaccaaacaaagttcacgacatatgtcattaatagctgcaaagaaaataataatctaaaattaacagcaggattgcaagaacgcgattttatatatatagaagatctgcttaatgcatttaaatgcctcattaaaaatatagataacttagtatctggtgaaagcataccaatcggttctggacaagcaataacaattagaaaatttgtagaaaccgtagctaaaatcactaattatcaaggcgagctagagtttggagctatacctactcgtcaaaatgaacttatgtacagctgcgcttcattagaaagaatgaatgagcttggctggaagtgtgaatattcactgaatagtgcaattaaagatactttaagtaaggaatagaaaaatgaagcttttgattactggtggctgcggttttttaggcagtaaccttgcatcacatgcaatcaagttggggatggaggttatagtttttgataatttatcccgctatggctcgtcagagaatctacaatggttacgttctatcggtgattttacgcatgtgcatggtgacattcgaaacaagaatgatgtaaccaggttaattcagaaattcaaacctgataatgtatttcatcttgctggtcaagttgcaatgactacatcaattgataatcctcaaatggactttgaagttaatgttggtgggacatttaatcttctagaagcaacccgtctttttaatcccgaatgtggaataatttattcatctactaacaaagtatatggagatcttgagcagtttacgtatagagagaataaaactcgatatgaatgtatcgaaaagccaaatggatttgatgaaagtgttcaactgaccttccattctccttatgggtgttctaaaggcgctgcggatcaatatatgcttgattacgcgcgtatttacggccttaaaacagccgttttccgtcattcttcaatgtatggcggccgccaatttgctacttatgatcaaggctgggttggctggttctgccaaaaagcggtagaagctaaccgtgggattaaagctccgttcaccatatcaggtaatggtaagcaagttagagatgtattacatgcagaagatatcatttcactttatttctcaactctagctaagttggatttggccagaggcaatgcttttaatattggtggaaccatacagcacagtctttctctgttagagctattttcattattagagaagtattcaggtgtagaattaaattatacccaattgcctgttcgggaaagtgatcaaaaagtttttgtagcggatataaataagattaataaatttactgactggtcaccgaaggttgatgctagtgaaggtgtcaggaaaatgtacgactggtgtaataactactaattatcataagcagcggcatgcgagctcagagcatgctgcacaacaaacactttataaatggaatattgtggaactttttataaagaaaataccaactcatatatgggttgctttatcctcgtgggtatctagaataatttctgcagcaattcaacttttaagtattagatacttgctagatatgatgggcgaaaatggctacgctgcctttactttacttgccggccttgttgcttggggaacgttggctgactttggcattggatatagtttacaaaattttatatctgagcaaagggcaaataagaaaaaatataatgactatatattgacatcagcatgcttaatattgattggtatattggttttgatgtcaactttatggccattaacaaagtttttagcaccagcatatttgcaagggtttgatgttcatacaatatctgacaagcatttattgctatacatcactctttgtatttttattttcaccagttttggtggggttctatataaaatatggtttgcggaacaaagaggttggattgctaatgtaattactgcattgtcttctttgctaggccttatgctaataattatattcagtaaatatagagcatctgccagtatatatttagctgttattatgttttttggtccggcagcactaatacctgttgtgatattcattgcaagaattctcaaaacattcaaaactgaatcaattaaaaaatttaattttaatctagttaataaagtattgaagagagcttccggttttgtgcttttttcttttttagctacaattgtcctccaggcggattatattgtaatgtctcaaaaattagccgctagtgatattatcatttacacggtattaattaaagtgtttggattggttctttttgtttattctgcattgttacaggccctttggccagtatgtgccgaatatagggttcaaaataaatggtctgagttaaattcaatcgtaagtaaatatataacattaggtgctatttttatcatcgtttgtagtattggtttttatctatttaaaatacaaatcattggtcttatctctaaaaaaataaatactaatatagatattacaacgatagctttattttgtgcatatttccttttgcggatttggtctgatacatatgcgatgctgctacaaagcatgaattatttacggccattatggtatttggtacctgttcaagcaattctgagtttgagcctccagtggactttagcatcagtttacgggatgaaaggtatgttaactggattgattttatcttttttatttactgtggttatatttcttcctgttttctataagagaaaaataagagaactacagtatgtctaatttattttaaatggttgaaaatttataaatatatatattttaaatccatttgaaaagttttcctgtgttctcaaagagtgtttaaaggattttagatgaacagcattaagatttcattttgtattccaacgtataaccgctgcgagttattatctgagctgatcggtagtattatttctcaggcggaagatagagatgatatagaaatctgtatttcagataatgcatcaacagataatactaatgaaatgataagctcttggagagagaaaacacatatcccaataatttataaaaaaaacagtgaaaatataggtcctgataaaaactatttagcttctgtcgctttagcttctggtgaatattgttggttgtttggcagcgatgatgtcttatctgataattcattagaaaagatggatgaatatttaaaaacaaattgtgaaatatacttgtgtgatcgtaatgagtgtgatctggcaatgcggaaagttgcttataggccttggatgactaccggcgatgtaatgtattccaccgagaatcatcaagaactaatacgatatttttcatgtagcaattcaattggagctgtatttagttttttaagctctattatagtaaaaagaagctcttgggagaatgtatcctttgatgagtcatttattggtagcgcatatagccatgttttttatctattagatatcgtgaagcatggtgcaaaaatccagtatataaataaaccattagttgatactcgacttggaaatgatttctttgccaaagacggtgtagtgagaagaatagaaatagactttaatggatatataaaattggctgagaaattctaccaaaactaccctaatgtaaagtccgagtttttggctattttactgagagagcattcagtcctgcatactaacatattaacctctgtatatggtgaaaagggacaaagagacagaatgaaacatcattttaaatacgctggcgctaatgcatttttggttgattttgtttattttgctaggcctttatatttattttcttcaaagttaaaacttgagtttctgtataaaaaaattcgtagattcctatataaatgatgttttatcgtttatatatttttacaaagcgccactttttattgtgagaaaaaaaatgttcgctgtaaataaaactattactgtctatgtttcactttatagcatgtctttgtggatcgcttttatcagcagtatcgtcaccggtcaatttaatggtgatctggtcggtatagatgttggacttgataacactactctattctatattgccctatttaatcagataataatattagcagtgccattattatataaaatagtgacacattataaattgagtttagggggataccgatttaatataaacataaatagattctcactatttatgtttataataataacaatgaatttagtgtttttcttgacaactggtgttggtaaggtcttcagcaaagagactcatccattagcacctttattcgtaattatagcacctagtggtattttttatttttactatcttatttctagagaaaaaagtggggtgttattttttttgaatgtttttttatattcatctctggaaataatgaaaggatggaccggatttatactggttcttgcaatttttgagatgtatttttttatcttaaggcacaggaattctaagtttttaaaaataccatttctattttctatattaatgcctttacttctattgatttttggaggtgcgttaaataagcatgtttttgttttaaaaaatgaaattagagggaattatgttaatgctgatgaattaagttattttgattctatcagtttgttgagtagtagattgactaatttttctgtgtctgcgggaatgtattcacgagttgaaagtgtcgtatccacggcaaaggaccagggggagtttactgagcttaaaggctttgcacgtagactgtttccaggggttattgaggatactggtttcaggactttaagtaattccacgatgttagctttttttcccgattatggtgagcaatctaacgtcgatactggtgtattaatgtattactatgtgctatttaaagctgatccatatggtgcagtattctcaattttattatcattatttttacttgtaagccttgtcgctttttatcgggcgatttcaaataaccataataatataaatatttttatatttattatgatattttatctattttacactgcttctactgaggcttcttttgttcggccctatataactggcgttatatttttccctcttctcttttctattggtgttattaaaattagaaagaagagtttaggcgatttagggggtgaagataaggtgagaaatgtgtaatttactgactcagccataaagttatatcaatacctggttatattaagtttttcattgattgcaggatctttatgaaaatagtttatgatgggattattaattcactgcaaagtaatggcggtattactgtttattttaaagaattagttactcgtctgcccagtgggaattttgattggtactcttacgataataaaattggtgatgtaggcgttaaaagtattgatcttaaaggccgtctttttgaacgctatagagattgcttattaccagatataaataaagatatatctccaatatttcattcatcctactatcgtctgcccaaagagcatatgcctgtagttacaactgttcatgattttacatatgaaaagtttgtcagcggtcctgcgaaatggatacacacatggcaaaaaaatagagcagtgaagcatagcgatttgattatttgtgtttcggaaaatactgcgaaagatttacagtattattgctctgtccctagtgataaaattagaattattcacaatggtgtgtcggataaatatcattctttaacgccaaccaaaactaatacgaataaagttatctttgttggtgcccgtggcggatataaaaatttcgatattgccgtaaaagttatatcgcgactccctcatcttgaattatctgtggttggtggcggtgagtttactgataaagaactatcactattaaatcagcatctaccccatcgctatcattggttggggcggctgagtgatgaagctttgaatgaggcttacaattctgcttatgcactactatatccgtcgagttatgagggattcggtattcccatcctagaagctatgcgtgccggatgccctgtagtcgctgtaggagtgtcttctataccagaggttgctggagatgcagcgatattagtgagccgccctagtgtggatgaattagtcgaaggcttagtcgcgatagataatgaaagatctaagtttattgaatttggctttcagcaagcagctaaattctcatgggataagtgttatcaagaaacactcaatgtttataaagaattgaataaataatacggattacaatattatgactaaaattgcgcttattacaggtattactggacaagatggttcttatttggctgaattcttattagaaaaaggttatgaggttcatggtattaaacgccgcgcctcttcctttaataccagccgtgttgatcatatttatcaagaccgccatgaagaaaaccctcgcttctttttgcattatggcgatttaactgatacttccaatttgattcgcttagttcaagaaattcagcctgatgaaatctataacttaggtgcgcagtcacatgtggctgtttcatttgagtcaccagaatatacggccgatgtcgacgctatggggacgttgcgcttattagaagcgattcgcattaatgggttggaaaaaaagactcgtttctatcaagcgtcaacctcagaactttatggattagtgcaagaaacccctcagcgtgaaactactccgttttatccgcgttctccttatgctgtggccaaaatgtatgcttattggattacggttaactaccgtgagtcttatggtatgtatgcgtgtaacggcatattgtttaaccatgaatctccacgtcggggcgagacatttgttactcgcaaaattactcgtgctgtagcaaacattgctttgggtttggaaaattgtctctatttaggcaatatggattcgttacgtgactgggggcatgcgaaagattatgttcgtatgcaatggatgatgcttcaacaagagaagccagaagattttgttattgcgacgggtaaacagattactgttcgcgagtttgttcgcatgtcggcaaaagaagctggaattgaactggagttcagtggtgaaggtgttgatgaaatagctactgtagtggcagtgagcggtaatcatgcctctgcagtgaaagttggcgacgttattgttcgtgttgatccccgttatttccgccctgcagaagttgaaacactactgggtgacccagcaaaagctaagaaagttctgggttgggttcctgaaattacagttgaagaaatgtgtgctgaaatggttgcaagcgacttgcaacaagctaaacagcatgctttgctgaaagctaacggttttgatgtatccatttcgttggagaattgatgataatggataagaaacgggtatttgttgcaggccatcgcggcatggttggctctgcgattgtgcgccaacttaagaatcgcagcgatattgaattggttctcaaaactcgcgctgaactagacctgatgtctcaagccgcagtgcaggcattttttactgatgaaaagatagatgaagtctatttggccgcagcgaaagttggaggaattcaggctaataataattatccggcagagttcatctacgaaaacttaatgatcgaatgcaatattattcatgctgcgcacttagccaatgtacaaaaactgctattcctaggttcttcgtgtatctatcctaaactagcagaacagccaatgactgaggccgcactgttaactggtattttggagccaacgaatgagccttatgctatcgctaaaatagcagggataaagttgtgcgaatcatataatcgtcaatatggtcgtgattaccgtagtgtaatgccaaccaatctctatggtgaaaatgataatttccatcctgaaaattcccatgtaattcctgcattattacgccgtttccatgaggcgaaattacataatgatgaggaaatggttgtgtggggaacagggaaaccaatgcgcgaatttctacatgtagatgatatggcagctgccagcgtacatgttatggaattatctaaccagatatacgctgctaatactcagcccatgctttctcatattaatgtcggtacaggtgtagattgtacgataagagaattagctgaaactatggcaaaagtggttggattcacgggcaaactagtctttgacacaacgaagcctgatggaactccgcgcaagttgatggatgttagtaggttagccaaattaggatggagttatcatatttccttggaagaaggactcatgatgacttatcagtggttcttagataaccagcataatttcaggaaataatatggctcgtcccttagatacatctttgttcaagactattgtggctaatacgccattgatatctatcgatctcgtcgtccaggattctcagaatagaatattacttggtaaacgattaaatcgcccggcaaagaattattggtttgtaccggggggacgagtaagaaaagatgaaactcttgctgatgcttttacccggctagcaaaagaagagttaggattagctacctctattcaaaatgcggcctttattggcccatttgaacatttctatccggataatttttctgaagaagaattttcaactcattatgtagtgcttggctacaaactggtcattgagacacctttagtacaattgccaaaagatcaacattcccagtattgttggagagcggtcgatgatttactttccgctgacgatgttcatcttcataccaagctctattttcaagacaggaagtaatcgctcatgctattacccgtaattatggcaggcggctctgggagtcgcctgtggccgctatctcggactcattatccaaagcaatttctggctttgacttcagaactcacaatgctacaggaaacgctacttcgattagacgagcttcctcatctagctccgcttgtgatttgtaatgaagatcaccgttttattattgctgaacagctgcgccagaaaaaactctcacatagcggcattgtattggaacctgttggtcgtaatacagccccagcaattgcgttggcagccttgcatgcgactttaaacggcaatgatccgttattactggtattagcggctgatcatgttattcaggataaacctgcatttattcaggccgtaaaacgagctgaacctcttgctgaagctggtaagttggtcacttttggtattgttcctaatagtccagagactggatatggctatatcaggcagggaactccggttgaagatggcgcttatcaggttgctgcttttgttgaaaaacctgacttagctaccgcgcaagaatatttggcttcaggaaattattattggaatagcggtatgttcgtgtttaaagcatcacgctatttacaagagctagggttacatcgacctgatattcttgaagcttgccagttagcaatcgccggtcagcgtgctgatttagacttcattcgactgaatgaagaggctttttataactgtccggatgattcaattgattatgcagttatggaaaaaaccagtgacgcggttgttgtgcctatggacgctcagtggagtgatgttggttgctggtctgcgttatgggaaataaatgataaagatagccagggaaatgttgttcgcggtgatgtattaatcgaagatatgcatgatagttatgtctattctcaaaataggcttgtggcgacggttggagtaaacgatctcatcattgtagaaactaaagatgcggtattagttgcgcataaagataaagtgcaggatgttaaaagtatcgttaacaaactcaaattagaggagcggtgcgaatatctgcaacaccgtgaggtataccgcccttggggctcccacgatgctattgcagaaggtgttcgctaccaggttcaacgtgtgtcagttaaaccgggccagcgcattgcaactcagattcattaccacagagctgaacattgggtcgtcgtatcaggtatagcaaaagttcactatggcgataaaacctatttagtgaatgaaaatgagtctacctatattcctgtaggaattgcgcattcaatagaaaatccgggaaaaataccgttagaaattatcgaagtacataccggaaactatctttcggaaagtgatgtagaacgtgtagataacttaggtgtagggtattaatgatgaaagtaagtattattactgctacgtataatagtgaaaagaccattatagatactcttttgtcgttagagaaacagacacatttagatattgagtatattattattgatggagcatcaaaagataatactcttaaagtgatagatagaaactcaaccagagtttctacaattatcagtgaaccagacaaaggtatttatgatgctttaaataaaggtatcttagctgctactggggatattattggttttttacactcggatgatttgctagctgattcaaatgtcattgccgatgttgttgcaacgtttgaaaataatggatgcgatgcggtatatggtgacttgcaatatgtggcaagggataatattgaccatgtcatcaggtgctggaaaagtggtgattttcgcccacgaaaaatgcagtatggatggatgcctcctcacccaacattttatatgaaacgtgaattatatgagcgttggggcggttttgatttaagtttcaaaatatcagcagattatgactcactaactcgatatattatatctcatcaggttaagttagcgtatttacctcgtgtgctaaccaaaatgagggtcggtggaataagtaatcgttcagttaaaaatatgattcttaaatcaaaagaagatattaagattatgaagaagcaagctttattttggcctgtgtcattaatctgcaaaaacttatctaaaatccctcagttcataaagtgatatatatgtctaaactaacttgtttcaaagcttacgatattcgtggtcagttaggcgaagagttgaatgatgagatagcatatcgtattggtcgagcctatggtgaatttgcaaaacctaaaacagttgttgtgggtggtgatgtaaggctaacaagtgagagccttaaacttgcattgagtcgtggtctgcaagatgcaggtacagatgtattggatattggattatctggtacggaagagatatattttgcgaccttccatcttggagttgatggaggaatagaagttacagctagtcataatcctattaattataatggaatgaaacttgtccgtcagggggccagacccattagtggtgatacaggtctacgggatatacaacgtttggccgaatcaaatgactttccgcctgttgttgagtctaagagagggagctacaagaaaatatcagttattgatgcatatattgatcatttaatcggttatataacgccatccttatttaaacccctgaagttagttataaatagtggaaatggggctgcaggacatgttattgatgctttggaaaagcgttttgataagcttgatatgcctgtaactctgattaaagtccatcattcaccagatggtacattccctaatggaatccccaacccgctactgccagaatgtagacaagacaccactgatgctgtattagcccatggtgctgatatgggaattgcctttgacggcgattttgatcgatgcttcttctttaataataaaggagagtttatcgaggggtattatattgtaggattgctagctgaagcgttcctacaaaaaaaaccgggctcaagtattattcacgacccgcgcttgagttggaatactattgatattgtaactgctgctggcggaaagccggtcatgtcaaaaactggacacgctttcatcaaagaaagaatgcgtgaagaagatgccgtttatggtggggaaatgagcgctcatcattattttcgtgatttctcttactgtgattctggaatgattccttggctgttaattgcagagttgttgtgcgttaaaaataaaagtttggaacaattagtcgaagagtgtatgagtgcctatcctgcatccggtgagataaattcaatattgtctgatccagcctcagcaatttctaaagtgcgtgcgacttatgaaaatgaagcgctggtcgttgatgaaaccgatgggattagccttgagttcaaagattggcgttttaacttacgtagttctaatactgagccagttgttagattgaatgtagaatctcgtgctaataagtcgctgatgctggaaaagacagaagagattttactattattaagatcgtagagattacttgtagttaaaaatatcagctccctgtggatctatatgtttaatataattctctgggtgctaattttagtaacgattatcaattcggtgacggttaatgacggataattttaaagtaaataacagtaattctaaaataccttctgattatggttttcctaatgttaattcatcgaaagatgagatagatttatttgagttaatggctattatttttaaatctaaaataaaaataatatccacaactttgatttttatcattatcggtttggttattacctttattctccctcaacgctggacgagcacagctgtcatcgtctcgcctggcgatgaacaaattcaagtgttagataagataacaactaatttatctgtgcttgatattaagcttgatatcagttcagattatttattgtctacttttaaacaaaactttgattctcaagatctccgtgagcaatatttagtgaatactgagtattttaagagattaatgcgagataaacctgaagatggtctggagaaaagagcattaattgaacggatagtgaatgagaatatcacatcagtcagcccgctgagagataaaggcgataatgataaggaatatcgatactacaaattatcatacagcgccatgacggctacagatgcgcgtgatttattgcaggggtatattaactacgttaacagtatagttaatgctgatgtatctagaaaaatacagcgtgctgttgatttagctaaaggtattggtactgataaatatactttggacctattgcgtgccaagaataatcaggaagttaaaattgaacgtttgaagtacgcgacttcaattgctgatgcggcgggtataaaaaagccagtttacagcagtggttccgctattagtgatgatccggatttccctattactatgggatccgatgcgctgaatcgtaaattggaaattgagaaatcggtgactgacctggcttctatcaatgctgaaattcttaaccgtagactgtatcttgataagttaaatgcgctggaaattcctaaagtggaagtggtgccatttaaatatctgcaacagccaaccgagccaaccaaaagagatgcgcctaaacgtgggctgattatgatcctgttcgcacttgcaggtttggtggggtctgtcggttttgtgttagttgatcatttcatgcgtgaacgcgagcgtgaagaagagatgctaaaactggcgaataccgataaagaataacgaaccaatactaattgatattttacattgccggattagcgctgcttgtccggtttttttttgataaaaattctgaggttagcattcatccttgttgtttgaccgcgttaaatcgacctcatacctttcccctaattatgtttccagcttgagcttatgctaaaatcctgttccttttcatcttcacactgccaatcaaaacaatgaaatttcctggtaaacgtaaatccaaacattattttccggttaatgcccgcgatccgttattacaacaaacgcaggttcaggctgaaaatgaggtcagcacctcttatatcgtcggtatcgaccaaaccctagtcgatattgaggccaaagttgatgagggatttattcagcgctacggtttgagccagggacattctttagttattgaagatgatgtggctgaggctctttatcaggagttaaccagcaacggtttgattacccatgagtttgcaggtggcaccatcggtaatacattgcataattactcggttctggctgatgaccgttctgttttacttggaactatgtgcagcaatataaagattggtagctatgcctatcgttatctgtgtaatacctcaagtcgtaccgatttaaattatttgcaggccgtggatggcgctattggccgctgttttaccttgattactgagaacggagagcggactttcgctatcagtcctggtcaaatgaatcagctacgcccagatagcattcctgaagaagtgattgcaggggcctccgctttagttctcactgcttatttagtacgttgtaaacccggtgagccaatgccagatgcaactatgcaggctatcgcgtacgctaaaaaatatcatgtgccagtggtgctgacgttgggtacaaaatacgtcattgcagataatcctcaatggtggcgagatttccttaaagaaaacgtctctattttagcgatgaatgaagatgaagcactggagcttacggggatcagcgatccattgatggccgcggatatggcgctggattgggtagatttggtgctatgtaccgccgggccaaatggcctttatatggctggctatacggaagaagcaggcaaacgccagactcaacatcctttactgccgggtactattgctgaattcaatatgtatgaatttagccgcgcaatgagaaaagagcattgtgatatgccattcaagatttactcacacatcgctccttatatgggtgggcctgagaaaattatgaatactaatggggcaggggatggggcattgtccgcagtgttacatgatatagcggccaacggttatcatcgtaataatgttcctaattcaagtaaacatgtgcgtagttacctgagctattcgtctttggcgcaggtttgtaaatatgctaatcgagtgagctatcaggtgttgaatcagcactctcctcgtctgacgcgcggtttacctgagcgagaggatagtctggaagagtcttactgggaacgttaatccaatcgctagacaacaaaaggccagcattgctggccttttgtattttaatttcggtctagtcagatcgggcaagctgcgcttttgacttcttcagtcaacgtatcgattttcagcatatttagcatgctgccggcaatctcgcgttcacccataacgacctgatcggcaccgcggtcggaaatataaaccacctcatcgtcataatgcgctctggcaataatctcaaggtctgggcgtttgaggcgcgctgcagcgacaatttcacccgcctcatagccatttggaatggttagtaacagccagcgtgcgcagtctagtcgagccaatgacatgatttctgcattggctgcgttgcccagcaccgcgttaattccttgctcacgcaaggcttcgactcgggttcgggagttttcgatgaccactaatggaacacccgctgcattgagttttgaaccgagcaggctacctacgcggccataaccgactaataaagcgtggttacatagatccactggaatttgtttttcttcttctactgcttcttccagaatttgatcttccatggtttcggttttaattagatagcgatccaacaggctaaatagcaatggattcagcatgatagaaagaatggcactggctaaaaccagattgcggccatgctccgacatcaaaccaagggagatccctaaacctgctaaaataaaggcaaactcaccgatttgcgccaaactgactgaaatagtcagtgcagtgcgtttagagtggccaaacatacgaactaacaagaaggctgcggcagatttaccgaagataatgatagccagtgaggcgataaccgctaaaggctcacgaaccagaatcatcgggtcgaatagcatgccgaccgaaacaaaaaacaggacggcaaaggcatcacgcagcggtaaagtatcctgagccgcgcggtggctaagttcggattcgtttaacaccataccggcaaagaaggcgcctagggcgaatgagacgtcaaacagccctacagcaccgtaagcgatacccagcgctaagaccagcacggccaaggtaaatagctctctggagccggtactggcggtttttgccaatatccatgggacgaggcggcggccaaccactatcatcaaggtgatgaaggcgatgactttaccaatagttatggccagttcggtgaataattggctcaaactggtattttcgctacccataacgccagcgaatgctggtaataacaccaatgttagtaccatcgccagatcttcaactatcagccagccaatggctatttgcccacgctggctgtcgatcaactgccgttcttccagtgctcgcagcaataccacggtactggcggtagacaagcaaagaccgaacaccaagcctgtgaccagatcccagcccagcatgctcgaaaggccgatacccaacaatgtggcaactgcgatttgcgctatggcaccgggaatggcaatggattttacagcgaggaggtctttaagagagaaatgcagcccaacaccgaacattaacaggataacaccgatttcagccagttctggcgctaatgacgtatcggcgacgaaacccggcgtgaatggcccggctaacacccctgcggcgagatatcccactaatggggagatgcgcaggcggtgtgccagtgtaccgaggaggaaggcgagaaccaggcctcctacaatcgttgtaatcaggggtgttgagtggtgcatccagactccttcttgttatgcgggcagtgttcattcacagcaatagcactagtttattgcatttgtgcgaactttacccgataaaaattcatattttgtcaatgaaactgaaggttggcctgtaaattgcgtaaggtggttatttatgagtgatatctcatttagacctaatagatataggtagttaagccagataatactgctatctcatccggcttaagttagtaatactgactacttttcttcaatattaggcagtaaggcagtaaatatgccaaggagtggcaggaatgcgcagatttggtaaactaactcgatactggttaaatcagcaacataaccaagtacagccgcacctaacccgcccataccgaaagctaaaccgaagaataatccggaaaccatgcctacctttccagggatcagctcttgggcataaaccagaatggcagaaaacgctgatgccagtatgacaccaatgatcactgtcaaaatgccaatccattgcagagatacgtagggtaaaataagggtaaatggtgcaacaccgaggatggagccccaaataacgtattttctcccgactctgtcccccaagggcccgccaatgatggtgcctgcggctacggcaaataagaatataaacagatgtatttgggcattttgtactgaaacaccaaacttatggattagatagaaggtgtagtagctacttatactagttaagtagaaatacttggaaaaaatcagtactagcagaatcgctaaagtggcaattatggtctttttaggcagtgtttgtaccggtgccgcttttatcggcttaccggcgaccgcgcgattttgcatttgataccatttactgacctgtaatagcactacaatggccagtaatgccgccagtgagaaccagccaacattccctttgccgtagggcgcgataaacatcgccgccagtaatgggcctaacgcactaccaaaattccctcccacctgaaacagcgattgcgccagcccgtgacgtccgccagacgccatgcgtgccacgcgggaagattcaggatgaaacacggaggaaccggtaccaaccagcgccgccgccagcaacaccaccggaaaagtagtcgcggcggccaataataagatgcccgaaagagtgaatcccataccaataggtagagaataaggctgtgggtgtttgtctgtgtagaggccaatcagcggttgcagcattgaggcagtcatctgataggtcaatgtaattaagccgatttgagtgaagctcaggctgaactctgcctgtaataaaggatagatagctaaaatcagcgattgaatcatatcgtttagtaaatgagagacgcttatcgcccctaaaatagaaaacgaagttcgctttaaggcatttcccttattttgggaggttggagggacgatgcgatcggtcatgatgagtatcagcctaattgtttttattgcgaaaggtagcgcggtaatggatacatattatgcatatcgtatgatttttactatatccaacattatttgacggatatcgcaaaaatgtgaaattcaggtgtatctaatcgagttacaatgcaaactgcatcgaggtatcaccttgattctcacagaaatcctgaactcttacgcgatctgtattcatcagactgacttttactcgacccgcttttggcgattacatggagatttgccatgcgtttttcattaaataccacagcatgcgcgttggccgtaacattggcctttgcccccggatgggccagcgcttgggaaaaagataaaacttacgacattactttactgcacactaacgatcatcacggccatttctggcaaaacgatcacggtgaatatggcctggcggcgcaaaaaaccttggtggataatattcgccaacaagtggcagcagaagggggcagcctattgttgctttccggcggagatattaataccggtgtacctgagtctgatttacaggatgcggaacccgattttcgcggtatgaatttagtgggatacgatgctatggcgatcggaaaccatgaatttgataacccgcttagcgtattacgtcagcaagaaaaatgggccactttcccgctgctctctgccaatatttatcagaagagtacccagcagcgcttatttaaaccttatgccctgtttgataagcaagggattaaaattgcggttattgggttaaccactgacgatacggctaaaattggcaatcctgagtatttcactgatattgaattccgtgtaccggcggtggaagccaaagaggtcgtcgaaaaactgcgtcaggatgaaaaaccggacattatcatcgcagccacccatatggggcattatgacaacggtaatcacggttctaatgcgccaggtgatgtagaaatggctcgtagcctgcctgcaggttatctggacatgattgtgggtggacattcgcaggatccggtttgtatgtccagcgagaatcataagcaggtagattacgttccgggtacggcttgcgcacccgatcgtcaaaatggaacctggatcgttcaggcgcatgaatggggtaaatacgtcgggcgtgcagattttaaattccgcaacggcgagctgacgttggttaactatcagctgattccggttaatctgaagaagaaagtagagaaagccgacggtaccagtgagcgcgttttctataccgaagagatcgctgaaaatccggcaatgctgaaattactcacgccgtttgaagataaaggcaaagcgcagctggaaattaaagtcggtagcgttaatggcaagctagagggcgatcgtagcaaagttcgcttccagcaaactaatatggcgcggatgctattagcggcgcaaatggagcgtgctggcgctgattttgccgtgatgagcggcggcggcgtacgtgactctatcgatgctggcgatattacttataaagatgtgctgaaagtgcagccattcggtaatacgctggtttatgtggatatgaagggcagtgaagttgagaagtatttggccgtcgtcgctaataaaaaagtggattcaggcgcctacgctcaattcgccaacgtcagcctggttgccgatggcacaggtgtcagtgatgttaaaattcaaggtaaaccgctggatgcgaataaaacctaccgcattgcaacgctgaatttcaacgcgctaggtggtgatggttatccgaaggtggatactttgccaagctacgttaataccggtttcatcgatgcggaagtcttgaagcaatatattgaaaaacactctccgctagatgctgcggcctatgagccgaagggtgagattgtttacaagtaatgagttgagttgagatgaggtgaaaataccttagggactttttatctgaacggggagtacgggtagcgctaatgcgtctatgcgtattccccatttttggctcagtggcattctgtggcagagagaagcgaggattaatcccgtttggctatatccgcgaataccgcattgagcaactggcctaaatctgctggagctagctctatatccagcccgcgtttgccgccggaaacgaacatagtggcatattgctgcgcctgactgtcgatgaccgtgggtaaacgttttttctgtcctaacgggctaattcctccgactaaataaccggttactcgctgcgccagctgtggatcggccatatctgcttttttcgctcctaaggctcgggcaactttttttaaatccaattgagtggcgaccggagtgacggcaacggctaagtttttggcttctccattcaggcaaaccagcagagttttataaacttgccgggcatctagccctaattttctgacagcttcatcaccaaaattcgtttctgcactgtcgtgttcgtaagggtgaagagtaaaggcgattttttgcttttccagcagaatgacggcaggagtcatgattttcgtccactataaaaataataccagttaatcataacaggactatcgttgcagctaatccttatctttttagtatcttacgcttaatgcagcttagtaagaaaaaaattaacttaatagaatcaaaattatgaaattgtattcctcaataataatgaatcccagttgcttataggatccgcgggttgctaccctgatatggcaaattggttgaccgtcaggaaagccggcttgctacgtaataactaaaacaatgaaaattcctctttgactggccaatagcgatattggccatttttttatccatgagctggctgcattaaagccggtaaatttccgtcgccatataaatgtaaagcgcccacagcaaccagataatgccccgccggtaaggcagacagttgtttttgccattgctggttacgttgcaccattaatagctcatataaatcatcgctaaaagtcgttgtcagtttagccaggctaccgcagggttgtcgctctaaccaccaactgatcatggtttgtaacatgcgggcgttggtgtgccagtgagccagagtatcttttaacagccccattccgctgtcaggcagggtttccagtagggaaagctgcatttgcgagccttcgagttcgataatatttttccgctgcgctttggctgcattcaataattggtaatcaataccgtattccccgcgcagccctagattttgcgcctgacgcgcctgtagcatcagcgcgatttgccaggccggaagggtggccagagcgaacgggtcggtttttaattcttcacagcgctgaacgagctgttggtaatctgtttcagagagtcggtcgaccaacgggagctcatcgggatagtgagcgaaaggggatccaccttgggtaatatcggcctcaacgattaacgcatcggcttttatcaggcgatccaacagaatatccggtagcgggaacatgccttcggttcccatatggatactccctaccagatggaagtgacgtgagccgggcagttgtaaatcgatacccggatacggataactcggcggagaaaggatgccaagaaaggtggctagctgacgtaaaagttgacccataccggtgtgcgtcctgatttagcatttctcccatgctaaacgctaaatggcgcacaagaaagggttgtgcgccactgggttaggacttcgtttattgtttaggtttaaaacgtaacaaacggttggcattactgacgacggtgattgaggacaacgccattgcagcccccgcgaccaccgggcttaacaacgttccggtgaacggatacaaaatacctgccgcgattggaatccccagcgcgttatagaaaaatgcgccgagcaggttttgtttcatattgcgtaatgtggctttggatagctctacggcatcggcaacgccgtgcagactatggcgcataagcgtaattgccgcagtttctatcgcaatatcgctgccgccgcccatagcaatacctacatcggcctgagccagcgcgggcgcatcgttaataccatctccgaccatcgcgactttgttacctgcagcctgtaactgcttaatcgcatcggctttgccatcgggcagcactccggcaatcacttgatcaataccggcctctttggcaatagcattagcagtaatcgggttatcacctgtcagcatcactaatttgtagccttgttgatgcagacgttgcaatgctgagacactatcgctgcgtaacggatctcggatggagaacagcgccgcgacttgaccattggccgccagaataaccggcgtggcacccgtttccgcctgttgccgcattaagtcgcttaactcaagggtatcaatctcttgttgtttcagtagtgcattgttccctaatagcagtgatgctccttcaacatcaccgctgacgcctaaaccgcgcagggtacggaactggctggtggcaggcagagtcaggcctttggcacgttgcaaaattgcctgcgctaacggatggtttgagcctgtttccagcgcagccgcccagccaagcgcctgttgttccgtaatcccgttaaaggtatggatagcgacaacctgcggacggccttcggtcaatgtaccggttttatcaaataccaacgtattcaagccgctggcctgctgaagcgcatcggcatctcgcaccagtacgccaaactcagcggcacgaccaacgccagaaatgatcgacatcggcgtggctaatcccagcgcgcaagggcaagcgatgatcagcaccgtggtggccaccaccaaggtatatacaatttggggctgagggccgaagaagtaccaaatcacaccggcaatcaaggcgatagccacgacggttggaacaaatactgcagagattctatcggctaactggccaatttccggcttactactttgcgcctgacgtactagcttgataatccgcgccagcgtagtctggctgccaatggcgttagcgcggaacagaaccgatccatcctgcactgaggttccggcgtgtactttatctccagcggatttctgctgcggaatcggttcgccggtgagcatggcttcgtccatccacacttccccctgcacaatttcgccgtcaacgggaactcggtcaccggtggtcaaacggagggtcattcccagctgtacgtcagccagcgggatttgtttctcaccgtcctcagtcacaacccgcgcggttggcggtgccagatccagcaaacgttccaacgcattggacgaacgttgtctggcgcgctgttccatcgcatgtcccagattgattaaaccgataatcatggcgctggcttcgtaataaagatgccgggcctccatcgggaatacatcgggccagatattgacggtaatcgagtaaatccaggcggcaccggtgcctaatgccaccagcgtatccatagtggcgctgccgtttttcaggctgacccaagcgttgcgatagaaatgtccgccggcaaagatcatgaccaacagcgtcaatacaccgatcaccagccacggggtttgggtttccggcgtgagcgtcatactgccgccgaataagccccatgccatcaatggaatacctaataatagccccagcgcggcctgccattggaaacgtttcatattggcctgagacatttcctgctggcgttcccgccgtttagcttcgtcttcgataatctcagcgccatagcccgctttttctactgcggcgatcagcgcgctattatccggagaaccggtcaccagtgcgctacgttcagctagattcactcgcgcgatctgcacgccatccacgctttgcaacgctttttgtactttagaaacgcagctggcgcagctcatcccggttaacaatagctgcacgctatccggatcgtcgccgtctgacggagcggttgcgggagtattttcagttgccggaagagaagaggccgctgccaaagattccggcgcagattgcgtagcatgtgccagcggctcagtttttgggacggcgttttcctgcgccagcgtggcctgataaccggcattttccacggcggcaatcagtgcgtttgcgtcgactcgaccgtaaactttggcgttggaggtggatacatcggcggcgatgactcccggaacggcttccagcgcttgacgtgtcgttgccgcacagtgcatacaggttaagccggaaagctgtagctctacgtccggttgttgtactggctccgactgatagcctgcctgttttaccgtttcgatcagtgcctgtatgtcggcctcaccgaccactttcgcatagtgaacgttaacctgagcctgttcgacgtcaggccggtcttccagcgctttttgcacccgtccggcacatttcatgcaggttaaaccctgcaaagcaagcagcgtagtgtgtgacatgattaactccttaaagagtaaaaacttatccttttgactgcggggataagtttagtcggtattaagccctttaccttgatgccgatcttctggcaggcaacaaggttaatttctcttgaccgacgtgactattttaactacttatggaggttaaaccttccagcaagggtaaggtcaagggagaaatatgaatatcagcgatgtggccaaaaagaccggtttgaccagcaaagcgattcgcttttacgaagaaaaaaagcttgtaactccgcctatccgtaccgataacggttatcgcagctatgatgcccgtcatattgaagaattgactttgctgcgacaggcgcgccaggtgggatttactctggatgaatgtcgtgaattattggcgctgttccataatccggatcgccatagtgcggacgtcaaagccgcgacgttacagaaagtggctgaaatagaacggcatattcaggatttgaatcagatgcgtttacgcttactggcgctagcggcagaatgccccggcgacgagggggcggattgcccgattatcaataatctggcgggttgttgtcaccgcgaggagaaaggatagagataagaagcccacggtcgcaaaccgaacgtgggcgataaactagcgtattattgcacggacattcaaggtgttaccttcaatggagaccacttcgacttccgtgcccacgcttaattcttcagaactatggatacgccagctgctgtcgccgactttcatccgaccatagccatccagtgtcggttccgtcagcgttgcccgcaggccaaccatttgatgatcccgctggttaagcatggcaggctgcggtttgactcgtttactcagccaataccaccacaaaatggcggcgatgacggtgagaacggcaaagagtacgccttgccattcccagcttaacggcaacatccagaccaacaggccaaccagtacagcggcaattccactccataacagataaccgctggcacccaacatttccgcggctaataacaagccgccgagtgatagccaaaaccaatttgggtttgctgcaatctgtttaagcatggttatttacctcggctggttttgctctcgccaatcagttcagcgataccgccaatcgcgcccatcaggctgctggcatccagtggcatcatcacgactttactgttgttggctgagccgatgtgttgcagcgcatcggtgtatttctgcgccacaaagtagttaatcgcctgaatatcaccggcggcgatagcttcagaaaccattttagttgcctgagcttcggcttctgcggcacgttcacgggcttctgcttgcaggaaggcggattgacgttccccctcggctttcagaatctgagattgtttttcaccttctgcacgcagaattgctgcctgacgcacgccttcggcttccaaaatatccgcacgcttggttcgctcggctttcatctgggcgttcatggccgaaattagttcggtcggcggacgtacatcgcggatttcaatacgggtaattttgatgccccaagggttggtggcttcatcaacaatatggagtaaacggctgttgatgttatcgcgctgggacagcatttcatccaattccatagagccaagcacggtacggaagttggtcatggtcaggttaacaatcgccagttccaggttgctgacctcataagccgctttgaccgggtcaataacctgaataaagcagactgcatcaatggcaacgttggcgttatcgcgggaaatgatttcctgtgaaggaatatccagaacttgttccatcatgttgattttacggccaatgcggtccataaacgggacgacgatgttcaggcccggcatcagagttttggtatagcggccaaagcgctcaaccgtccactggaaaccctgtgggacaattttgattgcggagaacaccacaaccagcgcaacgacgataataatcgggataaccgtaaacatagttaacttcctgtcggtcaatgaatattgtttcataatattacgcgacgacaggctaaaagactaactaaagggaggtaaatacatgtaaggaatcattctgctatcgaaaaagcagaaaaaaacctgaaaagtgaataagaaagggcgcgggaaagatcccgcgcagagtagctaaaatgggcttagtacagcagagagtagagctggcggcggtatttaccggccagagtatcgccggtgccaagggcggccagaatatccatcaaggttttgcgagcgttgccgttcgctgctgccagatcttttttcagatggctcatcaacagttccagtgcttcttcgttacggccaacctgatgcagttgcagtgctagctgtaccgccagctcgacgttttcaggctgctcggccagctgttgctgtaattgctgaatttccggcgtatctgccgcctgcttgagtaattctatctgtgcaatcaggccctgatagcgagtgtcccgatcttgcagtgggatagtttctaataccgcttccgcatcgtcactacgattcagttgaatttgtacttcagccagctgcaagccgatttcgccgttgtattggctaagctgccaggcatctttcagtagcggaagggcttcttgcgctttgccatcggcgataagctgcgccgcttctgctgcttttagttcttccggtttaggtaatacgcgttgtaacagttcgcggataacttcttccggttgaggtccctggaagccgtcaaccggctggccgtctttaaacagatagaccgcaggaatagaccgcaggccgaattgtgaggcaaccatttgttgagcgtcacaatctactttggccagaatgaactgaccggcgtattcggcggctaatttgtctaaaaccggcgttaattgcaggcagtgctggctacgttccgaccagaaatagaacagaaccggctgcgccatggactgttccagggtttgatgtaggttagcttcggtaatatcgataactgttggtgctagcatgactttattctctcatccgttttagcgatagatgggggcagaatatccggcttcaaccctctatcgcggtttatcggttatcaggcgttgccccgcaagacgcaatccagcaagcggcccggtaaaatgcgacgcagcacggtaacagcgtgtgccaccagtgtgaccggatagcgcaactttggccgcggcgcttctaatgcatgacgtaatttgggcaaaatcgcttcaggtggcagggtgaagcgtttggcgatacccggattattcactggtttgtcagcctgggtctgattaacgttttgtgtgaaatgagtgctaatcggccccggttcaatcaaactgacaaaaatcccgctgccgtttagctccatccgtaaggcatctgaccaggcttccagcgcatatttgctggcggcgtaagcgccccgacccggcgttgaaatcaaccccatcaccgaactggtttgaataatccggccttcgccgtggggcaacatggcaggcagcagtaattgggtgagttggtgggtgccaaatagattggtggaaaactgccgttccatttgttggcgcgaaatggtgtctagcgggccgtataagccatagccgccgttgttgaataaaccgtacagtcgcccgccggttagctcgataacctgtgccgcggcgcgctcgacgctggtgctgtcatccagatccagctcaataccttccagccccaattgggacatgttttctacgtcctcaggtttccgacaggcagccaaaacccgatagcctctgttacgcagatcctgcgccgctaccaaaccaattccgctcgagcatccggtgattaaaaccgctttttgcataactttacctactgaatgaacctatttgctcagactaatggtttactaagaacttatattatcagatagctaatatcttatattaataagtgcagcgttattctgacttgcctttttggataaaaggcgtgagttgctttgacatccagtcggcaataaacggctgcgcctcggcgttaggatgcaagctatcgtcctgcatccattcaggttttaccgctacctgctccataaagaaaggcagtagcggaatttcggcctgctgtgccaatgtcggatacagtgcggcgaatgactcggtatagcggcgaccataattaggtggaatgcggatttgcattaacaatggttgtgcctcggcctctttaaccagactgatgatttgcgccaaatcccgctgaatatcctgcgggggaaatccgcgcagcccgtcattggcacctaattcaatcaatacccagcggggctgatgttgtgccaacagtgcgggaagccttgccaggccttgcgcggcggtgtcgccactgatactggcgttgacgactttaggatgagcaggcagcgtttgccattgcttgtccagacgggtagcccaggcttcggcaatgggtaggcgataaccggcgcttaaactgtcgcccaaaatcaataatgtatcgtttgcagtagcgcgcagactgaataatcccaacagtagaaggaagggaagatgccagcggaaaacgttcttgaagttcatcatcttaataaacacgttggtcagggtgagcatcagctttccatccttactggagttgagctggttgtcaaacccgcacagacaattgccctgattggtgagtctggctccggtaaatcgaccctgctagggattctggcaggtttggatgatggcagcagcggcgaagtcagcctgttggggcagtctttgacagcaatggatgaggaagggcgcgcgcaagtacgggcgaaaaacgtcggatttgttttccagtcatttatgctagtgccaacgctgaacacgctggaaaacgttcagttgcctgcgttattgcgtggggaaagcgatcgtcagagcaaagctcaagccacggaattattgcagcaattggggctgggggaacgtctgcatcatctgcctgctcagctttccggtggagaacagcaacgcgtcgcactggctcgggcatttagcggtcgcccgcgggtattgtttgccgatgaacccacgggaaatctggatcgtcaaaccggcgaccgcatcgccgatctgttgttttctctgaatcgagattacgacaccacgctgattctggtcacgcatgatgaacaactggcggcgcgctgccagcggcgtttgcgcttgcgggatggcaagctgtgggaggaagcatgatttggcgttggttttggcgggaatggcgctcgccatccttattaattgtctggttagcgttgactctggccgtcgcctgcgtattggcgttgggcagcatcagcgaccgaatggagaagggcctcagccagcaaagccgtgattttctggcgggtgatcgggtattgagcgcttctcgtccggtatcagagggatggttgttagatgcggaacagcaagggctaactctcagtcgccaactgtcgtttaccaccatgacttacgccggtgatagaccgcaattggcggatgtaaaagctactgacagcgcttatccgttgtacggaacgctgaaaacccggccggagaatgcgcggctggaaccgggcaccgtgttggtggctccgcggctgctaactttattgggtgttaacgttggcgataggctggaggtgggggatgcgtcgctgcgtattgtcggggaagtgctggaggaaccagacgccggattcaatcctttccagactgcgccgcgcattctgattaatctggccgatgtggaaaaaaccggcgcagtgcagccgggtagccgtttgacctatcgctatatgtttgccggctcgccggataacattcagcgcttcggcgatcagataaaaccggaattacagcccgatcaacgctggtacggtttgcaggaatcgggtggcgcactggggaaatccttgcagcgctcgcagcaatttttactgttatcggcgttgctgacgctgttactttccattgccgccgttgcggtcgccatggggcattattgccgtagccgctatgatttggtggcggtgctgaaaacgttgggggcgggcaaggccgcgctgagaaagctgattgtcggccaatggatatcggtactgacgctggcggcattgtgcggtagcgcgatagggctgctatttgaacgactgctgatttccatgttggcgccagtgctgcctgctgcattacccgccgccggactctggccgtggctgtggtccatcggctccctgattctgatttccctgctggtgggattgcgcccctatcgtcagttattagcgactcagccgttacgagtgttgcgccgggatgtggcggcaaatgtctggccgctgcgctatttcatcccgttaatgttattagcggtgatcggagttctggcgctgttaatgggcggcaataccttgctgtgggcgattttgggcggcttgctggtgctgtcactgttattgggctgtatcggctggggcagcctattattgctgcgtcgactgacggtgacgcgcttgccactgcgtttggcgatcaatcgtctactgcgtcagccttggatgacattgacccaactggcagcattttcgctgtcgtttatgttgctggcgctgctattggtcctgcgcggtgatctgctggatcgctggcagcagcaattaccgccggacagccccaactatttcctgttgaatatgaccaaggagcaggtgccgcaggtcagtactttcctcaatcaacaccagattatgccaaccacgttctatccgattgtgcgggtgcgcatgacggaaattaaccagcagcaagcgaccgagcgggtgcatgaaaacgatccgggaggagaggcggtcaaccgggagcttaatctgacctggttaccggatttaccggctcataatcagttaactgacgggaagtggccgccaaaagcggatgaagtatcgatggagcagggcgtagccgagcggcttggtatcaagctgggcgacaccttaaccttcagcggcgatacgcagtcgttttcggccaaagtgagcagtattcgcaaagtagattgggaaagtttgcggcctaacttctactttattttcccgccgggagccttggataaacagccgcaaacctggctaaccagcttccgttataacggtaacgagcagttattgactcaattgaaccgccagttccctacgttaagcctgctggatataggctcgatgttgaaacaggtcggtcaggtattgcagcaggtgagtcgggcgttggaagttatggtggtgctggtcatgatctgtggcactttgctgttattagcgcaggtgcaggtgggaatgcgccagcggcgccaggaactgatggtttatcggactttaggcgcggggaagcgcttgctatgggggacgttatggtgcgaatttgccctgctagggctggtggcgggcatggccgccgctataggtgccgaagcttcactgtgggcgttgcaacggctggtatttgatttcccgtggcagcctaattggatattgtggtggatgttgccgttgcttggcgcactgttattgtctttatgtggcagttggctgggcgctcgtctgctgcgcggaaaggctttgttccgcagctacgaaggttaacaaccaaggctaaatatcggttatcagcattggttagatgataaagaaaagggcagccattggctgccctgattctactaactgactctgcgataaaaccgaggcgtttatggcatctccgttattgcttatcccagttttttctgcgcccagcgcagggcgctttgatattcatttggtagcaagggtgacaactcgttcaacgtttcggccaattgtttttccgccggatcggtgagattcaaatgcccgactttacgcccatcgcgcacttctttttcgtaccaatgcagatgaaccagaggctgtgaaagccatgccaaattaaccgcagtgccgatgagattcaccatgaccgaaggggtgctaaccaccggttttggcagtggtaaatccagaatagcgcgcagatgcaattcgaactggctgatggacgcgccattttgcgtccagtgaccgctgttgtgtacgcggggagccagttcgttgatcagcaggttgtcgccgacgataaagcattccatcgccatcacgccgacataacccagctcattcataatggcggacaacatgctttctgcctgagcctgcaatttggcatctggctgcggtaacgctacgctgatacgtaaaatgccgtcttcatgcagattatgggttagcggataaaataccgtttccccatcatggctacgtgcgccaatcagagaaacttcgccagaaaaatgaatgccttgctcgacgatgcactcaccgtaggcgtccgcaggcaggctatcttgctcgccgggacgtaaacgccactgcccacgtccgtcataaccgccgacgcgacgtttaacaatcgccagctcacccagagaagcaaacacctgcggccactgttcggcattagcgagtaattgccaaggcgcggtggctaaattcaggctatccaacaattgcttttgcgtcaggcgatcggccaaacgcgggaaaatatctcggttaacgaaggcgttgtgagtagccaattcgcgggtcagtgcggtttccggccagcgctcaatttcagcggtaatcacactattctgataaggcacggcttcgggttctgcgtccaatcctactggataaacggcgattcccagcggctctccggcctgacgcagcatgcgccccaactgcccgttacctaatacgcaaaccggcttcatgcatcctcccgcggatcgggattattcagcacttcatcagtttggttttgacgccacgcagccagacgccctgcgagagttttatcgtgcagcgctaaaatctgtgctgccagcagcgccgcgttggctgcgcctgctttgccaatcgccagcgtccccacagggataccgcgcggcatttgcacaatggaataaaggctgtctacgccgctcagcgctgcgctttgtaccggcacgcccagcaccggcaccagcgttttcgccgccagcatacccggaaggtgcgctgcgccaccggcaccggcaatgatcacatccagtccattagcgtctgcctgttcggcaaaactgaataatttatccggggtacgatgagcggaaaccacttccacatggaaagggacatccaattcggtgagcacgtcagcagcgaactgcagggtggcccagtcacttttagaccccataactattgcgattttaaccccggctgtgatagccgaatcgaggttggctcccatgggtgtaaagctcctgtgattgtgcaaacgtcggccagagcgaattgtgtctggcgaagagggcgtagagcataccatgagccacaggcaaggaaaacggttgcgtagctggtttttgtacgaaaaagcaggatttttcaggatttggcagtaaggtttaaaacgggaattcgatcagctcgatagcttcaggagtgacgcaaatcatcgatccttccacatgccaggcacccaatacggcgcgatgtacggttttatctgccagtttaaggggatgaatcgctggacgatgtgtatgaccgtgaatcatccactccacgccattgcgttggaaagcatcaatcacagctgcgttattcacatccataatggcttcggatttgtctttattattctgttggctgtttttccgcatcgaagcggcaatgcgtaaacgccaggaaagaggtaaggacaggaataaccattggataatgggattgtgaacccggcgacgaaaatgctgataatccgcatcatctgtgcataacgtatcgccatgcaggattaaaattttgcgaccatacagttcgagagtttgttcttctggcagcagcatcataccgctttcggcagcaaaacgttttccaactaaaaaatcacggttgccgtgaatgaagtagcagggaattccccgatggtgcaagtctttcagggcactggcgacctgacgatacagcggcagcggatcgtcatcaccaatccacgcttcaaatagatcgcctaggatatataaagcgttggcgtgaatggcttcgcgctgtaaaaaacgcagaaaaccggcagtaattgccggttcctgaacgctaagatgcaaatctgctataaaaagcgtgcgcattccgtcgcaattactcgctaacggtaacgcttttgatgatcacatcttcttttggaacgtcctgatgcatgccgctacggccggttgcaacgcttttgattttatcaacaacgtccataccttcgaccacttcagcgaatacgcagtagccccagccgtcagcgcgctctgaacggaagttcaggaagtcgttgtcagctacgttaatgaagaattgagcggtagcagagtgcggatcgttagtccgcgccattgccaaagtaccacgggtgtttttcaggccgttgttcgcttcgttcttgatttgcgcacctgtttctttctggttcatgccaggctcaaaaccgccgccctgaatcatgaaaccatcgataacacggtggaaaatagtgttgtcgtagaaacctttacggcagtaattcaggaagttttcaacggtagccggcgctttgtcagcgaaagtattgatgacgatgtcgccgtgattagtatgaaaagtaaccataataatattcctgctagtgtaatatgtggaatcacaaagtgagtcgctactctttagacggctcttataacacatctgccggattgagtcagtattcgcgcctttccaacccgctctggccaggagaggcagaaaagcattagtggggcaatgtggctgattaataaagctatttataacccaataaattcaccgctttcatccgcgctttttatcatcacctttaaacgtcaaaccgcttaaaattgcgttattcagtaggttttaccgatggctgaccttgcaatgcaataaggatcgcgtttcaatatatccttgggttatttaagcgcccatttttggtaatatcctgtttatattcacgcgtacgcgcctagcaaaaaaccacggaatgtcccgatgctaaagatttttaatacactgagtcgccaaaaagaggaattcaagcctattcatgccgggaaagttggcatgtacgtgtgcgggatcaccatctatgacctgtgtcacattgggcatggtcgtacttttgttgccttcgatgttgttgcgcgttatctgcgttatttaggctattctctgacttatgtccggaatgtcaccgacgttgacgacaaaatcattaaacgcgcggcagaaaataatgaaacctgcgatcagctgacttcccgcatgttggctgaaatgcataaagattttgatgcgctgaaccttcagcgcccggatttggagccgcgagccactcaccatatcactgaaatcattgaactggcgcagcgcctgatcgagcgtgaccatgcctacgtagcgtcaaacggcgatgtgatgttcgcggtagatagcgatccggattacggtttgttgtctcgtcaggatttggaacagcttcaggctggcgcacgggtcgaaattgccgatgtgaaacgtaatccaatggatttcgtgctgtggaaaatgtccaagccgggtgagccaagctgggaatcaccttgggggccggggcgtccgggctggcacattgaatgttccgcgatgaacggcaagcagttgggcgcgcattttgatattcacggcggcggttctgatctgatgttcccgcaccatgaaaatgaaattgctcagtctacctgcgcccatgatggcccttacgtcaactactggatgcattccggtatggtgatgatcgacaaagaaaaaatgtcgaaatcgttgaacaacttcttcactattcgcgatgttttggcgtattacgatgcggaaaccgtgcgctacttcctgatgtctggacactatcgcagccaattgaactacagcgaagaaaatctgaaacaggctcgcgcctctctggagcgtttgtacaccgctttgcgtggcaccgatgcaaacgctacgccagccggcggagctgagtttgaagcccgtttccgtgaagctatggacgatgattttaatacaccggaagcctattctgttctgtttgatatagctcgtgaagtcaatcgtctgaaagcggaagatatggcagcggccaacggcttggcggcagagctacgcaaactggcgcacgttctcggattattggagcaagatccggagcaattcctgcaaagtggcgcacaggctgatgatgatgaagtgaccaaaattgaagcgctgattaaacaacggaacgatgctcgtgccagtaaagactgggcaatggcagattcagctcgcgatcagctcaacgaaatgggtatcgtgctggaagatgggccgcagggcaccagttggcgtcgtaagtagcagataagtggttttgatttgatgtaaacggtgggttcccatctttgaagatgtggaatcttgctgaataaccttgagtggcggtaataaaaatatcaaagaaaacattgcggtgctgatagctatcagtaaccgcaatgctctttatgaagcttaggctttaacctgtacggtcatcccctgaaactccacgatttggtctgccagaattttgcagcgcttgcgcgtttctacttttccgtcaactttgaccagaccatcggcaatcaccatttttgctgatgcgccgctgtcgttccacccttgaaacttcagcagatcgcacagttcaacatgagggtgattttccaactgaaaaatttccatgactatcctttaaatcaatttgtgttgatgtcgtgatattcctcgcaggcttgcaaggtattttgaatcagagttgctacggtcattggcccgacaccgccgggaaccggagtgatccagccagcgcgttcaacggcaacatcaaactctacgtcacccactactttaccactttccagacggttgataccgacatcaatgacgattgcgcccggtttaatccagtcacccggaataaagcccggtttaccgaccgcaaccaccagcaaatcggcacgttcgacgtgtgaacgcagatcctgagtaaagcggtgagtgacggtagtggtacagcccgccagcagtagctccaggctcataggacgaccgacgatgttggatgcgccaactacaacggcattcaggccgtaggtgttgatgccgctacgctcaagcagagtaacgatgccgcgtggcgtacaagggcggagttttggcgcacgctggcacaggcggcctacgttgtaaggatggaatccgtccacgtccttatcaggattaatgcgttccagtacttttacgttgtcgataccggcaggcaacggcaattgaaccaaaatgccgtcaatctctggatcttggttcagcttatcaatcaaagccagcagttcggcttctgaagtgctggcgggcatatcgtatgaacgagaaaggaatcccacttcttcacaggctttgcgcttactgccgacataaatctgtgaggccgggttttcaccaaccaacactaccgcaaggcctggggcgcgtttacctgccgccaaacgctgttgaaccagtgcagcaacttcagttctaacttgctgcgcaatcgttttaccgtcaataatttttgctgacatcagtggaggagtccatcaattaaaaaagcgggaatccctctattttgtcagaagcgaggcgtgctgtcaggcgtagaataacgaataaatgtacaggtgagtggttgtaaggcgaaaacccattgactcgcgggtgtctgcccgtataatccaactccgcaactgaccatccgcagcaagtattctgtggaaaatcaacaacgcgcccttagctcagttggatagagcaacggccttctaagccgtaggtcacaggttcgagccctgtagggcgtaccattttcaagtcaatgcacctctactgaattcgcttcttctcctttatactccctgaaattaatggatttttctgtcccgagctctaccgaggtcaactcagttatacccaaatcaagtggtatctgggggcctttgagggggctcatcgtaatggtctaatcattccggacactttgttagagatataatgagcaacactaacgaggtgagaatgcgaaaaaaatcatttactcatgagtttaaacaagagtgcgtcaatctggttcttcaacataagtacccggtgaatcagcctgccgaaacaatgaatattggcctttcaacctttcaaccttacaacctttcaaccttacaaccttacaacctttcaaccttacaacgctggctaaggcagtatcgcggagagatccgcggaaacacaccgatagccagtgctataacaccggaacaacagcgaatacaagaacttgaaaagcaggtacggcagttgcagagcgacaatgacctgttaaaaaaggcttcggccttctgtaagtatcccagctttagttccacacactttttgagatttccggtttctcagccatcagccgatattcttccggcgtcagattattcagggattcatgaggccgctcactgttgtattcattcagccagcgctccgttatttcccgtgcttcattcagtgttctgaacagataaaaatccagtatttcggtccggtacgttcggttaaaccgttcgataaacgcgttctgtgttggtttgccgggcttgataaattccagcatcacgccatggtcttcagcccattgtgccagcgccagtgatatcaattccggcccgttatccatccgcatcttcagcggatagccacggtttgccgctattctgtccagcacccgcacaatgcgctgcgccggaatattcaggtcaatttcgatagccagagcctcgcggttaaaatcatccacgacgttgaaagtccgaaaacgtcggccacatgtcagcgcgtcgtgcataaaatcaatcgaccagctttggttgagggcttccggcgtggccagcggcgccggattacgcaccggcaggcgttgtttccctttacgacgaaaattcagttttagcagacagtaaatccggtgtatgcgtttgtggttccaggcgtatccctgcctgcgaagcacctgaaaaagcttcttaaatccatagcggggatagcgttcagccgcctcagtcagcctctggatcaccggttcatcacgtcgtgtattcggttgataacgaaacaccgtcctgctcagcgataacgtcctgcatgcctgrcgtatgctcatcgtaaactgcgtggtcagatagttgacgagctcacgctttatcgctggttttaaagctttttttcgatgacgtctttcagcgcacggcattccagactcaggtcggcaaacatctgcttcagacggcgattctcgtcttctagatctttgatttttttgatatcagcggcttccatcccgccatatttcgccttccaattgtaatagctggcttcggaaatagcagcctcgcggcacacatctttgacggtcctacccgcttcgacggacttcagtacggcgatgatctggtgctcggtaaatcggatcttgcgcataaggatctcctcaggtgacatcatcagtatgtcggaagatctctaaaagtgaatgggccgtttaagcgggatacttacacttcttcgccatggaaatgaacaacgacaaaaagtcgcggtgaaactgaagaaggccggcgcaaacatccaacaggtatgccgctgcttatcgctcacgcgcagcgtgttttatgcccgtagtcgtcggccagtgatcaagcccgatgttctgatgttgcacgcggcggctaagcatgttcacactgaaatggatgccacatatggcagccggcgcatatgcatcgagttacgggagcagggttttaacgtgggcagataccgcgttcggcagataatgaaaaccttattactgattgctaaatgccccgggcgtcatcgctattcacgcggcgaaaaatccgctgtcgtggctgctaatctgttgaaccggcagtgtaatccagaaacattgaatacttggtggtcaggtgatatcacctatctgcgtaccgctcagggttggttatattgggctatcgtgatggacctatgttcaagaaaaatagtgagttggcccttctcagacaagccggacagcgacttgactgttcgggccttaaggctggcggtcaataaacgacgacccacagggtctgtggtgctctatagcgttcaaagggcacaatataccagcgcccagttccagtgctgtcaacaggaactggatgttacaggtacccctgaccacactcaacgccaacaaaccagaagaagaaaggatgactatcaggcagagcaagtatctgaataacctaatggagtaggatcaccggaatatcaaacgccgaacacggccgatgctgggatttaaatcatttcggcgggcgcagaggcatcgagttggtacagatgatacgtaaagagcaacttcagcatcccgcgggtgcgcatttatcaccggcggaataattttatttgttggcagcctaaaatatcggcagcgcaacttttgctgactctgctctgttaatgctacagaaccttttttaccagcaatgcctgaagcatggctcatggggtagcgtctgattgttgttacccccaatcactttgaaccctgattcgttcagtgttctcatcagataatcctagaaatgtactaactcctcatgatgcgtgagccagcactgctggtcagggcagagcgtctggtggctgcgggcatatccgggaagggaatgaagtcgccataggtgttacgccacagaacaccgtcttccacctgccgcagttcactctcccagaacaggctccagcctcgccccaacacatcaatttcagttgcggtgttggggggcatatttagcgcttaaataatgggatgaagtgtggggattgctcactatggtaatgcgaatgagttttaataatggtatatcttataattagaaaatctttaggtttctttacaaataaataaaaacgcgatcgagatcaaatacttggaacaccaaaaatatcatctttgtgttatcaatttaacgcagggtgttatatgaaaattaaagacttttttgttatgaccacgccttcaagacgtcgatatggtgtcgctttctttgttggtattattgctggcataatgtcagcttttgtaaagtggggcgcagaggtcccgttgccacctcgtacattctccggcggacgagacgaatttaatcccccttatttatttctgagagattatctcggtattgacccaactcaggctgtctatcatttctctgagcacatcattaatccggtgcatgtaactcatatcattttctctctggtttttgcgatcggttattgtttggtcgccgaagtctttcctaaagttaaattatggcagggggtaatggcgggtattattgcaacggttgccgtgcactggattagtttccctctattgggattaactccaccgctatcaggtctaccttttgatgaatatctctcagaattagttgggcatattttctggttctgggctattgaaatgatccgccgtgatttaagaaaccggataacccatgagcctgatgcggaagtaccgctcgattcacctttccgctaaatgttgctcgaggatcttaacccacactttgttgtgggtttttttacgccttgaaattgtccggtataaacgatcgtctacgggtacacatgcataattccattgtattggataagatttttattagaagaggtttaaagcatgaattctagggaggaaaagacggttaaagctgaggcgttggggagatcggctacgttgcaggacgaaagcaacttccgtcctgcattgaaacttaaatatatattaagcttcgattggcgcacgccagtcgtcagcacctgaagtgccagcggtagtgtgttcccagttgattttacgatatgacagagatacgcgcactaattgagtaaactcggttttagtgctgtcttggcaatgtggcattttgcaatcgatatcaataatagtggcatcttctaattcagttgtgaagaagtgctcttgtttaccttccacagaagtgcggtaccattttaattctactttaggcaacatttcacctgaagccagtgcgttataaagcaaaggaacagccttgtttaatgcaactgtaaaacggaatggtttatgagcacgttgaccggacggctgtccagattgtggatctgtaggcacggtaacaacgtgttcaaattcctgtaccagcatttcatcttcatgaccctgtacaaatatattaccaacagattcagcagtgaatgaacctgctgtaatgttgccttgtgtcttaccggtaatggagatatagcatggagttggcattgagaatatcctataaaagtgagttggtattgaaccctaaatgacgctaataacctgtaattgaatattccaggtgccggttattgcattgtatacacagagcaagaccttatcgtcgacgccactataatcagccaaaagcaaatctccaaacctcacaatgaggatagttaattagtaaaaacaccattagtttaaaaaattaaaataattgcaaaatcagaataatcatctttatggtctatttttttagatctaattttgtgcgaacttatttattcaaaaaaataaataatttacaactcattgttattgatgttttttgtaaattaaatttaaaaaaatatttgatcatgtgtgtattgagacgaacttcaaataaataatgatggatagttacctagttattttttctatggactttttgcggtgaaataagggaaaatcccttggagatgcattttttcccaatcatttaattaatttttgcatcatgtggaaataacctgcctgacccgatcagcgctgagattaaggaatatccaagaaaattttggttaagtattcctgtgcgtcgcattgactcatcttgagaaaaataagttatttcttaaattcttaggataattcttggatttataaccgaaaggtaatgtggatatgagtaaggataattcgagtagtgtcgctcctaaggaaaggatcaacattaaatatgtcccgaataccggtgaccaggttgcggaagttgaattaccgttaaatctgatggtagtcggcgatctgaaaggggttagagaagatacgccaattgaagaacggcaggttgtttctattaacaaaaataacttcaattccgtaatgaatgaagctgggattaatcttacttttaacgttccgaatcgtttagatggtaacggcgaagaagatatgccggtgacattgcctattaattcacttagcgatttctcgccggataatgtggccaagaaagttcctgaactgaataagttattagaactgcgtgaagcattagtggcgttaaaaggcccgcttggaaacatccctgcattccgttcacgtctgcaagacttgctttctaatcaaagcgtccgtgaacagcttctgaaagagctggaaatacttaaccaaaagtaattggtctggatacaaggaattttaagtatgtctgtacatgaagagaacgcagccacgcttgcaccggcagcgagtaccacttccttgcttgatgagattatgtctcaagcacgcatggcaccggaaaacgacggttatgatattgcgaaacagggcgtggcggcatttatctccagtattcttgataccggcgttaatgaagagccaatcaataagctgttagtggataaaatgatcgttgagctggataagaaactcagcgctcaaatggatgaaattcttcacgcagaagcattccgtgagctggaagcctcgtggcgcgcgctgaaactgttggtggatcgcactgatttccgtgaaaacatcaaaatcaatattatgcatgcgaccaaagatgagttgctggaagattttgaattttcaccagagattgttcaatccggtttctataagcatgtttactcttcaggttatggtcagttcggtggggaacctaccgctgcggtaatcggtaactatgcgttcagcaattcttcccctgatatgaagctgttgcagtacgtcagtgccgtgggcgctatggctcatgcgccattcctgtcgtctgtggctcccgatttcttcggtgtaagtagttttaccgagctgccgggtattaaagatctgaaatccgtatttgaaggcccggctcacaccaaatggcgtgcgctgcgtgagtccgaagactctcgctatcttggcctgacaacaccgcgtttcctgctgcgtctgccgtattcaaccgttgaaaacccgattaaaaacttcaactaccacgaagatgtcagtaaaaatcacgagcatttcctgtggggcaacaccgcttatttgctggcatcttgcctgacagatagctttgccaaatatcgctggtgtccgaatattatcggcccacaaagcggcggcgcagtgaaagatttgccagtgcatctgtacgaagcaatgggtcagattcaggcaaaaattcctaccgaaattctgattaccgatcgccgggaatttgaactggcagaagaaggttttattacgctaaccatgcgtaaaggcagcgataacgccgcgttcttctctgctaactcagtgcagaaaccaaagaactatccaaatacccgcgaaggaaaaatggcagaaaccaactacaagttggggacccaattgccatacatgttcattatcaaccgcttggcgcactacattaaagtgcttcagcgcgagcagatagggtcatggaaagagcgtcaggatctggagcgtgaactgaatatctggttgaaacagtacatcgccgatcaggaaaacccaccgactgatgttcgtagccgtcgcccgctgcgttccgctcaaatccaggtcttggatgttgaaggggatccaggctggtatcaggttgcgatgtcagtgcgccctcacttcaagtatatgggggcaagttttgagctgtcattggtaggccgtctggataaggaataatccgacatggcagcgctgttaagttgggagcgaggaagctcctccagcttgtttgagcgtatacagggggaaggctccggcctttcccgtcgtgcgcgggcagacgatttgctggtctcaataaaaggacatttgaacaaagtcctcaatgcccgccccggtggttgccagagttcggtagagctaggcgttattgatctcaatgatgctacctcaacggcaacggattttcggcgcagcattgagcacgccatcaaaaactgtattgagagttacgaaccccgtatctcatccgtatccgtgcatgcagaaaccaatgatggcgatccgctgctgttgaatttccgtatcagcgcgcaggtgagctttgacaacatcggcgatctggtggagttcaatattcagttggataacaaccggcactaccgttttgatcaggatttataatgtcgttcgaaaaatatttcagagatgaactggactatctcagacagctgggacgagatgccgccgttgaaagaccgcatctggcgacctttttatctgagcagggttcggaccctgatgtcgaacggttattagagggttttgccttcctgaccgggaacttacgggctaagatcgacgatcagttccctgagttgacccacggtttgctgaatatgctgtggccgaactatttacggcccacgcctagcatgaccattatcgaatacacccctgatgagaatgtggtgaccgaggcggcgttggtcaaacgtggcacgcagattctcagcaatccgattgccgatgaggattttgtcagcacttccccgaaatctggggcgcaatgcgtgtttactttgtgtcgcgacatctggttgttcccgatggcgattcgcgatatcacggtgaacaatagtaacgagcaaggcattattggcattaatttccaggctaaaaacgagctaaatttccaacacttacagttgaataagctgcgtttctatttaggcgaagaagcttataccagtacgcaaatctacctgtggatcagccactattttgagcgcgcggagctggtggttaacgatattactatcccgatgccggattttgactttgttccggtgggttttgatcgtcaggatgcgctgctgccgtacccaaaaaatgcctatatgggctaccgaattttgcaggaatacttctgttttcaggaaggttttctgttctttgatgtttgcggtattccggatttgccggggcatctgaaagccagcgaatttacgcttaatctgcatttttctcaggcgttgccgcctgatgtcaaggtgcggccaacgaccttccgtatgcactgtacgccggcggtgaacctgttccagcatgatagtgaagccattgcgctggatggcactcaggccgaatacccgctgcgtgccagttatcaccatcccgatcgctacgatattttctccatcgataaagtggatagctggctaagtgagaagggcgacggcaaagggcgctcccgcggaagagcgcgaaactacacgccgtttgaaagcttcgatcaccaaatcgagcatgtgggtgaacgccatgctctttattaccacctacgagtgaaaaaatccttattccgcaaagggttcgaacattacatcgcctttgttcgcggagacgaatctcagcttttacacgccgaagaaaatgtttccgtcagcatgacctgtaccaaccgtgagttgccgatgctactgcgggtgggggatatcaatcagccgaccaaagataacccgtcatttgcttcattccgcaatattacccggccttctgtgccgctttatccggtactggacggcagcctgcattggtctttgctgtcaaatatgtctcttaactatatgtctctgctggagaaagatgcgctgaagcagattctgcgcacctacgatttacccagtatgaacaaccgccaagcagcacgggtttcgcagaaaaaactggatgctattcagcgaatcgataccaaaccggtggaccgtctgtttgctggtgtgccggtacgcgggctgcaatccacgctgtatctggcgcaaagcgcctttaactccgaaggcgagctgtatttgttcagcaccattctggctcactttttctcactctatgccagcgtcaatgcctttcacattttgaaagtggtcaataccgataatcaggaatgttatgaatggccggttcagataggtcaacatgcgttgatgtagtgcccggagacgagtctctagacgtctcccgctataacttttttcagctggtagaactgcttaatcagctctcgggtaaaaaactatcctcgcagggggaggcggtagcctacccggcgggcgagagtattcgcttcagatccagcgccagcctggctttcccaacgcgggatgtggtggcgctggaaaagtcggagcgcggtcaatatcagttggaagtgtcctttctcggtttgcacggcagtcagtcgccgatgcccggttattacctggattcactggcctgggaagatgcacagaatgaaaaccgcctgacggatttccttaatgtattcaatcatcgcctgatcactttattacatcaggtgtggcggaaataccgctatcacatctgtttcgaagacggcggtgtggatgatttctctcaacgcatgtttgcgctggtggggctgggtagtgaggttattcgcaacaaacttcaaattaatcacagcaaaatgctggcttacgccggtttgctggccagtccggggcgttcgccggaggttatctgcgggctggtttcccactgtttcgatttacccgatgtagaactgcacagctggcaattgcgtcaggtcaatatcgacccgtctcagcaaaatcgcttgggcggacgggagaagattcgcggcaaaaagtatctggaaaaatcagtgctgggcagcaatttcactatcggttctcgcgtcgcggatcgcagcggcaagttcatgctttgcatcaacaatttatctcgcgagcgcttcctttcctttttacctaacggcgaaaactatcagccattagtgatgtttgtttcgttcgtgatgcgcgatcagttcgcgtgggatttgcgtctcgggctcgccagcaagcaggtcagtggcatggtacttggggcagaccaaaataatttactcggttggaccagttttttaggcgatccggaagagaaacccgacgtaaccatctgcgtcatggaatgacaacccgcattcaggaatagagaaaatggaaaaacaacagccaaccctcacactgcgggtgctaaacagcgacaaattggaaagtggtaaagcggccagctgcctgttcgatattcaggggggccgagtcggcagtggcagcagcaatttgtggtcgattcaggatcaaatgtcctcggttgatggcgctcagtttgccgtggaatggcaggatggcgcgttctgcctgcgcgttttggggcaaccggtcatggttaatcaggccagcttaacccgcgatgctggttttatccgcctacaggcgggggacaaaattaacgttggcatgttagccatgagctgtcacatcggtcatacgctggccgatcggcaagatccgctgacgttatctcctgaatcattggtttccagctatagcaatccgctggaggcgatgatggaaggaggcgaaccgccgcgcggtgcagaagcgccttatcagggtaatctggccgcgactgtttccaacgactttagtcaggatccgctgcgtattttacaaagtgagagcctgacgacgttaacgcagtcgcccgcgaccgaccccgatgccagtcaatccctacagcaggatcgctacagcagccctctgttttcttcaccgctatcagataccgccaaggacagtgccatggatcaggaatttatcgacctgcctcatatcaaccgccttaccgccattgatcaatcagaaacgttggaaatgcgtgagcaacagcacgtcgctatgaccccgctgatgcgtggcattgatgcgcaattgccgattaataatagccaggaagcccatgattttctggaggaaatcggcaaaacaatgaaagcggccatcgacggcttattggcgttacagcaggtgcagcacggattatcggataaacatttgcgtccgattgaggataacccgctacggctgaatctggattacgacaccacgatgaatgtgctgtttgccgatcagaaaagcccggtgcatctggccgcaccggcggcggtggcggagagcctgaataatgtccgtttacaccatcaggctaatcaggcggcaattggagcggcgttggcaaccatgctggacgcgttttcaccgcagcatttgctggcgcgttttgcgcattatcgtcgcagcaatgaacggcaggaaatggacgccgcctgggcgtgggagatgtacaacagctattaccaggaattggcctccagccgtcagcaaggctttgagaaactgttttgggaagtttatgcgcaatcttatgaccgcgccttacgtcagggattgcaggagagcgcgcaatgacacgcatcgcgagtcattcactggccgtgttgttgctggttctgttattgccgggatgcagtagcacttgggaagcgacgaaaaaagttggtcaggtgatgtgggatcccagtattcccgtgggtgtgaaggacgatcagccttcaacggtgcaaatcactctgctggccgaagcggatattaaccccaatgacagtggcgaagctgcgccgctggagattcaggtgatttatctgagcgaagattccaaattattggccgccgatgacgatcagctaaccagcgaagaattagaaaaagtgttgggcaaaaactacatcgaccatcaggactacaccctgttgcccggtcagtacaaacctttgccgccgattaagttgaaagcagagaaccgttatctcggcgttgtcggtcattacaccgacgcggaaaaagccgaatggaaaaaaattattcgtatcgacggcgttgggcacaactaccaggtgttagtgcatgttcgggcgaacgaaattgatctcaggaaagaggaagaatagcgatgccaaccaagaatcgcgtgatttggcgagaagggctatttatcaagccgcagcatttccagcagcaacagcgccataacgactatgtgttgcacagtcttttatcttcattaatggactatggctacggatttcggtcgttagtattgaatcacgaattattaaaactggggcgcgtgggcattacttcagccagcggtacgctgccggacggctcggtatttgatattccgaatcaggatcacaccccaaaacctttggatgtgaacaatctgaatgacgccgccagtcgtgatatttatctggcgttgccgatgcaaaacgacgcaataaacgaagtggccaacgcgcaaagcagcggagtaggcgctgttcgatatcaagagcgcagcgatagcgtgcgagacttgcatactcagggcggcgatgtgagcgacctggcattagcgcagttagcgccacgtttgatgcaaggttccgaagatctcagcgcttttaccgttttgccgctgtgtcgcatcaaggaaaggcgtccagacggagccattgttttagacgcggagtttattccaacctgcacttcgatttcggtttctcctgaactcaaacgctttatggatgaagttgagggaacgctggtagaacgcgccaaactattggctaagcgtatcggttcccccggccagcaagggattgcggacgtggccgaatttatgatgctgcaattgtttaaccgcgtgcagccattgttcacccacagtgcctatctctccacgttacatccgcaagagttctactgccaattggtgcaaacctgcggcgagctgagaacctttaccgatgagtcgcgtctggccggtattttcccggtgtataaccacgataatctgacggacagttttgttccgctgatgttggcgatgcgtcaggcgctcagtaccgttctgacgccgcgcgccatatcaattcaactgatggtgcaggctcacggcattcgggtggcaacgattaacgaccgcgatctgctgcgtagcgccgatttcgtgttggctattcgggcacagattccacaggaacaactgcgtcgccagtttattcagcaaactaaaatcacttccctggaaaaaatccgcgatctggtcagcgtccagcttccgggcgtgccgctggtggcgttatctgctgcgccgcgtcagttgccttaccattctggatacacctatttcatgctggatcagcaaagtcaggcctggaaagacattcagcaaagtaatgccattgcgttccacgtatccggcgacttcccagagctggatatgcagttctgggcgatcaggagcagctaaccatgagcgaaatcgcaccgaatattgcgtcattatttgatgagccggaagccgcgccgacgactcgccagtaccaattggagctgcgcggcgaaagtttgaacccgatggtagatgccgctacgccactgctgggtatggtgatgcgcctgaaaaatatggctaatcaggcgttgccggagcagctttatcagcaggtggtgacggatattcgcgccatcgaacagtttttacagaccaaaggctatgagccgggtgccattgtctctttccgctacatgctgtgtaccttcatcgatgaaaccgctttgggacacggctggaatagtcaaaacggttggttacagcaatcgctgttggtgcagtttcacaacgaaacctgggggggagaaaaaatctatgtgttgctggaacgcctgatgggcgaaccgcagcgttacaaggatttgttggaattcatctatctgtgtttctgtcttggctaccgagggcgctataaggtcagtgcgccgcagggggatgaatttgaacgtttattcagacggttacatcaccaattgcatgaaatgcgcggcgatgcgccgccgacggtattacacctcaacgccggagagtcttccggccgttatcggttaagcaagcgcttaactatcaaacatttactgtggggcggattagggctgttagcgctggtctacgggttttatctgattcgtttacacgatcaaacccaagatatcttgcagcagctaaacaacttattgagctaaggaaggccaaatgatccgcatagatttacccacattagttaatcgcctcaatcccatcgcgaaacatgcgctggaaacggccgccgcccactgtgtcagcgagcaggaaatcgaaattacggtttctcaggtgttgctgcaattgctgaatacgccgttgagtgatgtgcgtttaattatcaataaagctgaaatcgaccaagatagcttgagggaacagttggacacccgcgttcccagtcatcaggtagtgactcagtcttacccaagcttttcaccgctattgatcgagtggttgcaggatagctggctgctgtcctccacggaaatggatcacggcgaaatgcgcagcggggtcatgctgatgactttgctgatgagcccggcgcgctatctttccgcacgtgccgctcaattattggctccggtaaaccgcgagttattaaggcaaaactttagtcagtggacgacggattccgcagaaactcaggttgtttctcttgcggcaggccaaacctctgccgttcaacctaacggtgaaagtttgttagcccgttacgccagcaacatgaccgaacaggcgcgcagcggcaagcttgatccggtgctgtgtcgcgatgaagaaatcgatctgatgatcgatattctgtgccgtcgccgcaaaaacaacccgattgtggtaggggaagccggcgtagggaaaagcgcgttgatcgaaggactggcgctgcgaattgtggccgagcaagtgccgcaaaaattgttgagtgcggaattgatgacgctggatctgggcgcgctgcaagcgggcgcggcggtgaaaggggagtttgagaaacgcttcaaaggcattatggcggaagttaggcagtctgaaacgcccattattctgtttattgatgaagcccataccttgattggcgcaggtaatcagcaaggtggtctggatatttccaacctgctgaaaccggcgctagcgcgcggtgaattgaaaaccatcgccgctacgacctggagcgaatacaaaaagtattttgagaaagatgccgcgctgtctcgccgttttcagctggttaaagtttccgaaccgagcgccgccgaggccaccgtgattctgcgcggtttacgcaccatttatgaaaaagcccacggcgtactgattgacgacgaagcgctacaggcggcttctacgctcagcgatcgttatttatctggccgccagttaccggataaggccattgatgtgctggatacagcctgtgcccgcgtagcgatcaatttgaccagtgcgccgcgagaggtttcggctttacagactgaattgcaccagctagctatggaaatccagatgctggagcgcgagctgcatattgggctgagtgacgatagtgaacgcctggcaacgttactgactcagcgggaagagattgacgcccgtcgattggcgctgatggcaagctggcagcagcagcaacagttggttgagcaaattgttgcactgcgcagcattctactggaacaagacgatattaccgccgatgaacgagcggaattagtgcgtttgggtcatgaactggattcattgcaacaggtgcagtcgctggtttctcctcatgtcagcaaatcccaggttgcggcggtgattgccgaatggaccggcgtgccgctgaatcgtttgtcccaaagtgagctggcggttgtgactgagctgccactttatctggaaaagcagatcaaagggcaggataccgccattgcttatttgcatcgtcatttgttgaccgctcgcgccgatttacgccgccccggccgtcctctgggcgctttcctgttggttgggccaagtggggtaggtaaaaccgaaaccgtactgcaaatttcagacttattgttcggtggccagcgttatctgaccaccatcaatatgtctgagtttcaggaaaaacacaccgtatcccgcctgattggttctcctccaggctacgtgggctatggcgaaggcggcgtattgaccgaagccattcgtcagaaaccttattcggttgtgttgctggatgaagtggaaaaagcgcatccagacgttctcaatctgttctatcaggctttcgataaaggtgagctggccgacggcgaagggcggattattgattgcaaaaacgtggtgttcttcctgacttccaatctcggctatcaaaccatcgtcgataacgtcgctgatgcggattccatcaacgatctgctgtatcccgaactggctgctttctttaaaccggcgctgctggcgcgtatggaagtgattccgtatttgccgctgggacgtgaaaccctgctggcgattattgccagtaaattgcagcggttggataacttgttgcgtcaacgatttaacgccgaagtcgtgattgacgatgcggttacggaagaaatcttgctgcggaccactcgcgccgaaaacggtgcgcgcatgttggagtccattattgatggcgtcctgctaccgccggtctctttgttattactgcaaaaaatggcggcgggaagtgacattggctttattcgtatcgcagtagacggacacagctttgttgcagaggtagaggacaaggtatgaaacagcggctaaaaagcgtattggcgctattggataacgacaccattgagcaactgatacaccactttttgcaggttaatcatcgtcggcaacgttttgatgctttgctggttaccatgctgaacgtcaatgaaagtcgtctcgattgttacagcctacctcggcaggacgagcgcgcgacgctgaaactcgacgttcaaattgatgaaatcaaccatccgctggtacaggttttacgtaacggcgtccccgcagtgtgggattccttacagcgcggtgtgcgtatcgaaaacgccgattttcgcggttttgtgcaagaactgcccagcgcctgtggtttgtacgcgctgccgttgttcaactgcaacggtcaggcctgcggcgtggtggcggtatttgccgaaaacattgagcactacaccctcgccaacggcatgtttagcatttactgccatattttccagcatcgtttgaataaattgcaggaactggaacagcagcgagcgcaactgcgacagattcgcgaagtattcaaagcgcagcagcaacgacaaaagcagctggatgagttgctggtctccctcagcacatcggataacaacctgtctccggcaggtttatctaacgattacagcaaaatagacgatctgaccgaagcggtggaagagtttgaatgcaccattttgcgtcagcgtcagcgcatgtacggcacggataaaaaacgcatcgccgccagcctgaatatggcaccacgcacgctcgcctataagttggctaagtatcggtttcagttatgaaaaagttgatattaacagccacattgatattggcttgcagccacagtctgatggctgcagaagatgtacctaccgttacccaacaatcacctcagttatcggcgctgactcagtgtcgcaatgagccgtctcccttggttcgactagcttgttacgatcaggccagcagtccggttggcgtaaccgatgaccgaatgatggggccgggttggcgtcgtgccatggtgcaggaaaaagggcgggaggcacattccctggcttttctgacccgccagtccgctggcaacaatccgaccgtgattatcaccacgccggcgataggaatgccgcctccgcgtccggttctgatgtttagctgtatcgataacatcacccgcatgcaggtggcactggttgcgccgcaaaaggaaggcgaaggcgcgctcacctttgttaccgaccgcactaaattcgataccgaatggtttgttcgcgaagagggtttcctgctggaagccagtcgcgggctggccggtattgatgaaatcaaacgactgctggatggagaaaccttggccatcagctcaaaacaaggggcggcagtgcggctgaccttcaacatttcctcgctggcagaggcgatcaagccactgcgcagcgcttgtcattggtgaagttgatatgaatgctatcgcccaacatccctggcggaatttgctgctagccccgttagccgacgggcgcgcagcgctggcgctcaaagacgataacccgcgctgggagtttatcgacggcgaaatggtgaagctgggttcgcttacccacgccagtctgaatattgctgaattgcagcagcaggcgatgacgctgctgtccgaagaaagcaaagacatgcgcttactgacccacctgttgcgtactttgcagcacggtggcgaaccgcagaatatcttgctggcgatgcaattgctttgtgattacgtcagccatttttgggccgaagcctggccgcacaatggtttgcataaacgccgtttggcacagcagatcgttaaacgtttcgacgccgcagccagtctttttagccaacgagccaccggtgaacaacggctggaagctttagggcaactggcgcgactggcacagtgttggcacgaaagtgagcctcaattggcgaaagaagtggatgagctgagtttcccctatcgctatcagccagaacctcaggttgcggatacaccgcagaccagcagcccgtctttatccagcggcagcgcgccggtttcttctgtcgatgcgccggttacggaagcgccgattgccagcgtcacggtggacagttccagcgatcgtgcgtggcggcaaacgctgctgaaagtggcggatttgctgtgtgaacgccatccggacagcgacagcggctaccgactccgacgccacgcggtctttagcactatcaccacgccgcctcagtctcagagcgatggccgcacgccgctggccgccgtttcagcggatcgcaccgccagctatcaggctgcgttaccggcagccgatttagcgctgtggcagcaaatcgagcaaagcctgacgctggctccttattggctggacgggcattttctgtcggcgcaggtggctgaacgtttgggttatccgctggtggcgcaggcgattcaaagcgagcttcgcgctttcctggctcgcctgcctgccctgcgggaactgagctttaccgataaaaccccgtttctctctgtggaaaccgccgcttggttgcaaccgcaggaaacgacggtaactaccggtagcgcccgtgaggatcagaatgatatctggcagtgctatgagcaacagggattggaagcggctctggctgcggttgatcaacagcaacagcaacaaactgaacctcgggatcgtttctatagccagttgcttagtgcgcaattattggaaaaggccgggctggcggcaatggcgcaacagcagtatcagagcctttatttggcagggaaacagttgtcattaccggagtgggagccttcgctctttgccgggttatcagaaaaacagcggcggcagaactcatgacagccacgatgcgacacaggaatgttaatcaatgaaaatgccttcaatacccaaaatgccaaagatgccttcatttttacgtttattgaagcccattattccgcgttttaagtcttcaataccgatattgctggggctgctctggtgcatcgctttggtagtgatttggctgtgggggccactgtggcaaatgggggaacagcatccgctagaatcacagctgagtcgttggctggtgacggctgtgctggtattggttgcggtgtgctggctgacgtggcgagttacgcgacggctgcaagaattagaaaaactccaactggatcaacagcagcgggaagaagatccggtgcaaatcgatttggatcggcagaacggttatctgtctcgctggttgcagcagctacagcgctatctcaacacgccacgctatttgtatcagctgccgtggtatctgatgttgggtaccgaacagagcggtaaaactacgctgctgcgggaaggttataaactgacggaaatctacagccccgacgccagtaaaggcgatgacgccgcacagctacaggtgcgctgctgggccggtgaaaaagcggtggttgtcgatccgaccggaaagcttatcgagcaaccggatcaaggagaggaaggcaaacctcagctttattctcgcttgtggcaggaactgctgggctggctgcaacataaccgtaagcgtcaaccgctcaacggcatcatcgttacagtcgatgtttatcagttgctgaccgccaataaagatcggcgggaaagttatatcgaccatatgcgccagcgtctgcacgatgtgcaaatgacgctgcacagccagattccagtctatttggtgctgaccaagctggatttgctgtacggctttgaggcgatgtatcagtcgttggataaaacccagcgcgaagcgattttaggcgtgactttcactctgaatacgcaggatgaagatcactggcgcagcgagttgaatcaattctggcaacagtggatggcacaactaaacaacgccatgccggagatgatgtttaacggtgtggatagcgatcagcgcccgcagctattcagttttacccgtcagattcacggtttgcatgattacgtgctgcaaatgctcgatcgtatgctgtttagcggcgatagcaaaccggcgctgctccgcggggtttatctgacctcggctcagcagcgtggacaaatggacgacctgtttacccaatcggcggcggtgcagtatcaccttgggccgcaggcattcccgacctggccggtgggtgacacttcttcttatttcgccaaaggattatttaataatgtcctgctggccgagccaaatctggccggtgaaagtcgccaatggctgcgcaattctcgtcgccgcatgatggtattcagcgcctgcggagcggtggcgattgtcgggttgctattcggttggcatcagtattatcaaagtaactatcgggccggacaagtggtgttgactcaggctaaaaccttcttggaaattccgcctccgcaaggtgaagaccaatatggcaacctacagttaccgctgcttgacccgattcggcaggcaacactggcctacggtaactaccatgagcgcaatagcctgttagcggatctggggttgtatcaaggcagcaaaattgggccttacgtcgaaaatacctatctgcaattgttggagcagcgcttcttgccatcgctgatgagcgggttattggttcagctaaaagctgcgccggcgggcagtgagcagaaactggaaatcctgcgcgtgatgcgcatgttggaagacggcagcggtcgtaataaagggctggtggagcagtatatgcgtaaccgctggagcgagaagtttaacggccagcgtaatctgcaaaatcagctgatggatcatctggattacgcgttggagcataccgactggaaacgcagccgggataacggcgatgtgcagtcgattcagaatttcgcgccatatgttccggcggtaaaagccgcgcagcaggaactcagtaaactgtctctgtatcagcgggtgtaccaaaacctacgtatcaaagggcaggatgttttaccgcctgcgttgaatctacgcgatcaaatcggtgccagcttcgatggcatttttgtagccaataacgaagatctgctgatggtaccgcagttcctgacgcgtcagggcttgcaaagctacttcgtaaagcaaaatgaccagttgatcgatctgaccagtatggatagctgggttttgagtttgtcgaaaaacgtggaatacagcgataccgatcgcaaagaaattcagcggcagattaccgagcagtatctgggcgattacaccgccgcatggcgtgcggcgatcaacaacctggagatccgtcagtttgaggatctgccacaggcgatcgctgccattgagcaagtgatcagcggtgaacagccgatccgtcgagcgctacaaaccctgagcaacaacacgcaattacctgccgccagcggcgaagctgatgccaaagatctgctggaacagccggattaccgcctgatgtcgcggattaaccgcgagtttgcgccggaaactgctgcgctgattgaacacggtgataaaggcagtacgttgcaaagcgtctatcaaaaactgacggatttgcatcgctacatgctggcgattcagaactcgccggtaccggggaaagcggcgttgaaagcggttcagcttcggttggatcaaaataacagcgacccgatttttgaagtacagcaattggccaaaaacctcccagagccgctgaatcgttgggtgggcgatctggcggagcaagcctggcatgttgttatgatggaagcgattcaatcgctggaagtggaatggaacgacacggtagtgaaacagtatcgcacctatctggcgggccgctatccgtttaatcctgaatcgacacaggatgtgccgctgagcgagtttgaacgtttcttcgcgccaaaaggtgtgctggacaacttctatcagcaaaacctcaaacctttcgtcgaaaacaatctgaccaacggcagcgacggcgagttgctgatccgtgatgacgtcctgcaacagttacaggtagcgcagaaaattcgtgagactttctttagcagccagaacgggttaggcacgcagttcgctattgaaccggtggcgctggcggtcaataaacggcgcagcgtgctgaatctagacgggcaattgctggattacgcccacggccgcagcagtaaggtgcatttggtgtggcctaactccatgcgctcgggtgtggaaagcaaaatcactctggtgccggacgcttctggtaaatcgccgcgcagcatcgcctttagcggcccatgggcacagttacggctgattaacgccggtgaactgaccaatgtacgggaagattccttcgatgtgcgctttaacgttgacggcggccatatgacctatcgcattaccgttgatgagtcggataacccctttgctggcggactgtttagtaaattcaaattaccggacacgctctattaatgagtatgcccgacgcgcgtcgtcgggctttttttaaggaagagttttagtgagcgacaataaacagggattggttatccgcaccggtggcgatccgcgccaatggccggaattcaccgcgatccgtgaagaaattaacaaagccaatcatccctcgcagccacaggttaattggcggctaattgagtctttagccttaacgctgtttcgcagtaacggcgtcgatctgcaaaccggcgtgtattacaccctggcgcgtactcaactgaatgggctgacaggtttcaccgaaggctgcgagctgttggccagcctgattgtcagcgaatgggatcgtttgtggccggaaaaaccgctggcacgtattgaaatgctggaatggttcaccgcgcgactgtgtcacttgttgcgtcagcaggtgttcagcagtgaagatttacgactgatttatcgcgccgaacgtgccttgcagctcatgatcgataagctgcagcaggtgcaactgagccgagtgccgcgcatcgaaaatatgttgtatctgatgcaaaacaccgcgaaaaaactggagcgagccactgaagccgccgcgccgtccatccaggcctatcaaatgccgccgttggtgtatctgaccgcttcggatgatgccccgtcatcgcgggaagtgccacccgcgccaccccagccacagcatgacgatttggaacatgcacgagtgcaggtgcgctttgtgccgaccaagcgtatgtcggcgctgcgaggtttcaatttgggcatcggtttttcgctattgatcgccgcaggggtctatctgatgcaagtgcggccaatggcgcaacagctggctgctgtggccgctgagcctgaaggttcagccttactgtggctacaccagccggagctggagacctatggcgagcaaatggatcggctggctaaacgttctccgctggaagtgttaggtgggccagatgcgctaatgaaaaccgcccagcagctatggcctgcagatgcccggcaaaccggggtcagccaacgctggcaggagcaactgcaagccagaatgggcagcaatcaggattccgctcattactatcaggccaaaatgggcgttcagcagctttctgaaaaactgttagagcaggaaaaacagaaaggcagcctgaccatttcttatttaaaaactgcgctctatcgcattcaaaacaaccttaacagcgaaatcccgctggaagagctattgcgccagttctctgcgcaacgggagcagaagaaaggcgtctcgccggtattgatcaaacaaattgatgaccgcttcgatgccttactaagccgctaccaccaactgacggttcaaactgagccagcccattaacgccgacgagaagggataaccatgtttagtcgtgatgagaaaaaagataaaaccggcgcaagcgatgcattaggagccgcagccgttgatggcgtttccggtctggcggacggcgctggcatggtggccagcgtcgccggtggcagcgtggggcgtgcggcagagaaagtatccaaagtggcaggaaccgctagcaaagccgtagataccgcgaaaaatgcctccggtatggcttcgaaagcgatggataccgcgaaaaatatggcgggcatggcctcaaaaggcgtagatgcggcgaaaaatatcggtggaagcgccagcggagctttggatactgcccaaaatatcgttgctggcccagcatctaaagcgatgaaaaccgtacagggtgcagcatcacaagcgaccggcgcgatgaatagcgccaaaaataccgtcgggcgtgcggcggcgatggctggctcggcagctggcctcagcggcgcagcgggtttactgggcgggataaaacagccttcggggctgcaatttacgctaaccgccggtggtttgccggagcagactttcgtggtggtggatttcagcctgagcgaaggattgtcatcaccttttattttacacgttggtctggccagcgccgatcctgccattgcgtttgacgcggtgctagacgaagtggccaccctgtttatctggcgtgaaggcgagctgcaacgcagcattaccggtatggtctccagctttgaacagggcgataccggttttcgtcagacgcgctacagcatggtgattcgccccgatttttggcgtacttctctacgtcataactcccgtattttccagcagcaatccattcagaccatcgtttcttcgcttctgaaagagaacggtatcaatgacttcgccttcgctttgcgtaatccgcacccagaacgcgaattctgcgtgcagtatcaagagtctgatttccattttattcagagacttaccgccgaagaagggatgttttactactttgaattcgccaacggtaagaacacgctgatttttgccgatgatgtcggctctctaccgccgggagccgttttgccttacaacccgaccaaagcggcgcaggccaaagaactcagcatcaacacttttaaacgcagcgcgcaggtgcggactgccagcgtgcagttaaaggattacacctttaaaaatccaaactgggcggcggaattcaacgaacaggcacgagagctggaaaatcagcgtccagactacgagcacttcgattttcccggtcgttttaaagacgaacagcacgggcaggatttcactcgctatcggttggaggccctgcgtaatgatgccaaccttgggcagggagaaagtaatgatttccggctgcaaccgggtcagctctttaccctgactagccaccctcgggccgatctcaatcgtaaatggcagttggtcagcattcagcatcacggcaagcagatgcaggcactggaacaggaatctggcgatcaggggacggtgctgtttaacagctttagctttattccggccagtcaaagctggcggccaacgccgttgccaaaaccggtagttgatggcccgcaaatcgccatggtagtagggccgccgggagaggagatttactgcgatcaatacgggcgaattcgtctgcaattcttgtgggatcgctatggcaaatccaacgataacagttcctgctggattcgggtaacgcagccgtgggccggacaaggttgggggatgttagccattccgcgtattggtcaggaagtggtggtggatttccttcatggcgatccggatcagcctatcgtgacggggcgcacttatcacgccaataacatcccgccgggaaccctgccgggcagtaaaacccaaatggcgttccgatccaaaacccacaaaggggacggttttaacgaactgcgtttcgaagatgagaaaaacagtgaagggctgtttatgcatgcgcagaaagatatgacgaccaatgtgcttaacgatcgggtgaccaccgtggttcacgatcacaccgaaagcgtcggtcacgatcaggtgatttctgtgcgtaacgatcgtcataaagaagttgcgggtaacgaagtgacttctatcaccaagcagcgccgcatcatggttcagggtagtagcagtctggaagtcaccggcagcatcatgattcagtcttcggccgaggggattcagatcggcaccgccggtgccagtattactttggataatgcaggcaatatcaccattgagggcgccagtattacgctgaaaggcaacccgataaacctcaattaacgaacattcttcaccaaataattataagccacggagcgactatatgactcaccctgcttacctaatcaatgaaggcactttagccattccagccaactggcgcgatgaaaccatgaatgtgtttattgcccccgacgacagcggaatcaatttagtggtaagccgtatggcggttccggtcgggctggataacgaaagttactacgcgcaggttatcgagcaatttcaaaccagtctgcccggttataaagagcgcagccttacgaccgtcacgttgagcgaacaaccggctcgtttgctggaatatttttggaaaagccccgaaggggaaatgcaccaaagcgtggtgatgcaggtgcgtggcaccaagttactgaccttcaccatcacctcaccaaaagtactggcggagagccaaaaaacagcgttgctggcgattatttatagctaccaggctgcgtaaaagtgtgtaacgcgggaggcgtttcatgtcgttaacagatgatattgtgcagcgaattgcccgagttggggccattcatgccagccccaaaccggtcagttccggcgcgcccggaccggctgcggcgcgattgggcgatcctatcaagcatgccagttttctcggtgcattagccggagccgtggttggggcactcattagcgtagctatttttgcggtggctgctgcggtggtggtgggcaccggtgggttggcgaccgtggcagtactggcgttaggcacagctgggacttttgctatgggagggataatcagtaaggccagttcggcggtcagcgcgatggtagacagcgttggcccgacggacggcgttctactcagcggctctggcgatgtatttatcgaaggtaaagcggctgcccgtgcaaccggcgataccgctatgtgtagcaaacacagcgcgccggcgactatcgcccaaggcagcgaaagcgttgccatcaacggtatgccctcggcgcgggtgggggacaaattgacctgcggtccaaccattaaatccggcgcatctacggtatttatcggttccggtcagggtggctatctagaagtggccgaagaattttctatgctggaaaaagccattctggtcgccgtagaattcttggttccaccgagtaaaggtctattaaccggcacagcaaaactgtttaccaaagcggggagtaaagccgcagccaaaggcgcaatcatgggtgctaaacaggctgcgaaaatatgcgcgggtaaaaccttatcttgcgtaactgccgcatttaaaagtcataaaggcatagcacgctttactgaagcgggtaagaaattcgtcaagggtgaccctattgacgtggtcactggtcaattggtcgagcagcgtaccgatctgatgttaggccaaaccttgtcgctggcgtttacccgaacctgggctgagggctgttttggggtattaggggctaattgggcggatagcttcagcgaatacgcggttatcgatcctgaaaatgacagtattgagattttcactcaggaaggcagttctctgaacttttcgctaccggatggctatgcgttcagttttaatccggatcaccctgatttcactgtgacgcgcggcaacaagggtgtcatcctgacggatcgccgcagcggtattcagcgtcatttcgccttagtcgggcaaaaggatcggaataaatttctgcttagcgctcatcaggacattaacggcaatcatatcgatttttgttatgacgaaaggcaacagctcacacgcatttgtcacagcgacggttcggaactgacgctgatctggaatgcgtcgcagcaactgaccgaaattcgccgcaccgacgaaggtttatatgatgttctggcgagttatcgctatcacgacagcggttttatggcggaagcggatagcaccgagttctaccatcttttctatgaatataacgcgcagggttggatcagtcgctggcatgataatgatcaaacctggacggcatatcattatgatgcgcaaggacgttgtaccgacagcataggcgcagacggttattacccggtgcactttgactatttgccggggctgacgcgagtcagtaacccgcaaggagcaaccaccgagttttattttactccgatgaatcaggtgaccgaggttcgttctcccaccggaaatatcacccgatacgagtacgacagttacggcaatctgttgtcgcagatcactccttcaggccatcaaattaccctgagctaccttaaagataccggtctggtgacttcatttactaacgctatgggcgcctgctggcaatacagttatgacgatagccaaagactgttcggcattaccgatccgttagagcgtacctggctgcaacagtatgatgaaaaagggaacccccaaagttttaccgcaccagacggcagcagtatcacgttggaacgtaatgaatttgggttggtgactacgcaaattcacagcgacggtagccagcgcagaatggaatacgatcatcaccagcgtctgttccgcattttcgatgaagaacagcgggtgatgaatctgcgttacgacagccgggataatctgcaaactctcagcacccctggcggagccttatggcgctggcgctatgacaggcatcaacggctggcggtaagcgatcgcccgaacaacagtcaggagcactttacccacgatcgtcacggtaatctgacccaatatcatgatgccaacggggttagttggacggtggaatacggcgcttttgacctaccgatttcccgccgcgacggtgaaggccatatctggcgctatcgctacgatgctgacacgctacaactgatagcagtgactaatccccaaggcgaatcctaccgctatacgttggatagcgaagggcgggtcatagaggaacgggattacgccgatgcggtgtggtattaccgctacgatgccgagggaaattgtagccagaagcaggatgcgctagggaatatcacgcattatagctacgacccttgcgggcgcttactgacccagagcaacccggaaggagcgacgcagtatcaatacgatatgatggggcgtttgctgagcgttaccgcaccggatagtactttgcactttgagtatgacgaacaggatagaccgattcgcgagattcaggtagccggtgaaattctgcgtcgttatccggataaccagacgttggaacgagaaattaccagtgttgggcacgagtcgggcagttggctgactcgtattggcgtaaaccgcaccggtgagcttattcagctggaattgccagccggacaaagtttacagctacagcgggatgccgcggggcaggaagcgggacgcgaagcggcggcgggttttatgctgcgtcagcaatacgacctgatggggcaggttatccatcaacgcgcaggccgcaatacgcgggtattccgacaggaagaactgagtgacattcctcagcctacgttggccgaactggatcgcgaatatcagtatgacgctggtttgcagttggttgcgatcaacgatgatgttgaacgactgaattatgttgtcaatggcaacggacaggtgatttcggtcagcgaacgtaatcaactgcgcgagcattaccgttatgacgccagcggctatccactacccagacgggtgggcgatcaacagtgcggcgcagaggatgaaatttatcaccgcggccatcgtttaaatcgtcttggtaatcagctttatgaatatgacgccgctggccgaatgacggcgcgccgtacgcaacaggaaggcttccgaccggaatacacgcgatttatctggaatagccagaaccagctggtggaattgcgcaaacaaaatggtgatagctggcgctaccgttacgatgcctttgggcgccgtatcagcaaaacctgtgaacagcaaggcatccgtgtgagctatttatgggacggtgatgttattgctgaaattcgcgattatcgacagggcgagttgcaaaaaatccgacattgggtgtttaatggctgggagctgatagcgcaacaggaatgccgagtcagtgagggcgaggtaggcgaagtcgaaactcactacgcggtcagcgccccaacgggggaacccctcgcgctctttaaccccgcaggaaaacgcgtctggcaacgcgccaaccattcgttatatggcgcagcgctggcgaaagtgctcaaccacagccagccagaacccggtttaaaattcgccggccagcttctggatgaagaatcggggctgcactacaaccgcttccgctactacgacccgcaggcctgctgttacttaagtccggacccgatagggctggcgggggggttaaacttatatgcgtatgtaccaaatccacttacatggatagatccgctgggactagcgacgtgtcctcctgtaggaaatgctggtaatgatggctataagttctcgtttggctcacttcgtcatatattaagaaggcactctcctcatgtcggtcctcctaagcaagaaccatatgcatcaatgaagcctaaaaggcaaaaaggttcaccattcccatcggagtggagcaatagagatattgcgcatgctactgtggaggtcgctaataatcctgcaaatcaagtcatttctaatagggaagggttctttggtaaggtatttgaaggcacatcgacccaaaatggggtaacacaaaaaatacgtgttattacagaccatgttgatccgcatattggtggtactggtccaggtgttattacatctagtattccaattaaataagagagggttgatgaaatataccacatgtcaaaattgttattctagctatgaatcggatctggaaagatgtccagactgtaatgcatctcaaggtgaaaaagatgatgggttaatagtttttacagaagaagctcgttctgaaatatcacgccttggcggcattgtgtatgatgttattcatctccctgaagagcgctatttaattccatgtgagtggggggtgcttctttataataatgccaaaaagtctttttggcattacctttgtggaattgttgatgcagttgtggttaatgaatatgtggagatcacacatggagataagagagactatctgacacttgatgatggaagattagttaagagggagaatgttggctaactctcttctggcgtggaatgatcctctcaggatcattcctgctaattatgaaatgtcagtgcacatacaactctgctgaatcctaatcaccacctgaccgggcatcacgctgatcaccagcggttgcccggtcaggccgcactgtgtcagccagtcctctggcagagacagattgccgttatcccgtatctagttcacgtaaccacagccagccagaacccggtttaaaattcgccggccagcttctggatgaagaatcggggctgcactacaaccgcttccgctactacgacccgcaggcctgctgttacttaagtccggacccgatagggctggcggggggattaaacttatacgcgtatgtaccaaatccattaacgtggatcgatccactggggttggcggggtgccatactcaaaaatatgaagtaggaacttttgatgatttacagcggcgttcaaaagttggtgatggattagatattcaccatgttactcagaaacaccctgcaggccaggttatatctggttatgacccaaagactgcaccatcaatggctgttccgagagctgaacataaattaataccaacaactaaaggtacttttacaggaacgccaagggatttattagcgaaagatatacgagatcttcgtaactataccaatgcaccaccttcagccattaaagatcttatcaggctcaataaagaaatgttccctgaggcgtttactaaattaaggtaagttaaatggatgctaataagtttgtagatatattaaaccttgttgttaaagatgccgcggtagaagatataatatctatactggaatccccaccaggtaaaaagccatcaaaggaactggttgatttatccggcttttataattcacaggccgatgaggctaaagaatttataaaacagataatcaagcttgttgccgatgatgctttattcggtatgctatgtgttatcgatggcgttcgtgctatagaggatgatgaaaataaaggggagttggttttgacttatcagaaagataatgaattgtctgtcgtgttaaacgaagataaagatttgcacgatatatacaacgccaattagactaaagccgggaagatcctctttagttcttctcggcttttttatctgttgttacgctaatatattaccctgctgagtcctaatcaccaccttgccaggcatcacgctgatcgccagcggttcccggtcaggccacactacgtcagccagtcctctggcagagacagattgccgttatcccgtatctagttcacgtaaccacagccagccagaacccggtttaaaattcgccggccagcttctggatgaagaatcgggcctgcactacaaccgcttccgctactacgacccgcaggcctgctgttacttaagtccggacccgatagggctggcgggggggatgaacttatatagttacgttccgaacccactgacatatattgatccgctagggctggcatcctgtcgtctaaataatatgggaagaaccccaggcaaaaatagcaagactggcagagaagttattgaacgaatgcgtggtgaaggtcgtattcgtggtgctggtagtgatatgaggtttaaaagttcaacggataataaatggtatcgcgttcaggatgctgatatggctcacttaacagatgctgttaaatattggaatcagaaaggcggttattatggcccgaaatctaaagaagttagagcctttatgagagattccaaaaattatgaattagaatattttgggcataaccgttctcaaggtgctaaattgcctgatagatatagagatccaagtgattttattgggccagcagaaatgtcacaatatttttaataggtgggtgtatgaaagagcttgcagaagataacctggaattagaagaaaaaatagtatctatcatagaggctgggaatgtttacagtacgaatggtgactttgactctgcattgaaaaattatcaagaggcatgggagttactgccggaaccaaaattggaatgggaaatgttaagttcatggttatcaggttctttttatactgcatattttaatcggtcagattttgaaagtgcaaaatattggggtgaggcgcaacttaaagcaacaagctctaatatagatacagcaccatcaatcgacctgggaatggtctgttatgagttagagcaatatgatgaatcatataaatactttgacgatgcctataattatggtaaggctcgtgcatttaaagaaagaccgaagaagtatcttgacttttatttatccaagaaaaaagagatgaagtaaaaataaatggccggaatggatctctttagatctttccggccattttatatgtcgctacgctagtatattactctgttgaacccgaattaccaccttgccgggcatcacgctgatcgccagcggttgcccggtcaggccgcactgcgtcagccagtcctctggcagagacagattgccgttatcccgtatctagttcacgtaaccacagccagccagaacccggtttaaaattcgccggccagcttctggatgaagaatcgggcctgcactacaaccgcttccgctactacgacccgcaggcctgctgttacttaagcccggacccgatagggctggcggggggcgagaatacttacgggtatgtacataacccgctgggatggatagatcccttagggttggcagcttgtccactggcaaacgctggtaaacttaaaccaccgttagcgaaaccaggcgaggacttatttgttggcacatatagccaagtccgtggagcaaatataaagagtggtcttaatccaacccatacaccgcatcatgctattcagaatgctgttagtccgacgacacatgctcgaggaataacgataaacatgcgtaaagatctgcacgaattaacatggacatataaaaaaccgtttgtccgaggtttaacaaataggcaatacctagcaagagacattgttgacctgagaactatattccgtaatgctggatatagtaaggacgttgttaataggcagttgtctgagctaatcaaacaaaacaaagcattatggaaagctatggagctatgaatatgaacagaaatgaagcgctgtctttcttacgtcataatcaaccgatgccggatgatgacgttttaacacaagaactaattaataaatatgatgaggcaagaaagtttttcattgctcatcctgacaaagaggcaatctcattattccttaactcttatggtaatggagatgggtggggagtatatcaattagtagaagattttttttataaatgccatcgcgatgatgtagtgttggaaatacaaaaaacattagaaaacccatctgtaaccgacaatgtaagatactgggttacccaagtatcagcagcattcgctgatgccaaactaaaaaaaggcttggaaatatcgctaaaatcgaagaatgaagatatccgagaggcagcacagttatctcttgatatgattgatgactaatattagaacggggagataatatttggatctttccggtttttttatctgttgttacgctaatacattatcctgttgcacctgaatcaccaccttgccgggcatcacgttgatcgccagcggttgctcggtcaggccgcattgcgtcagccagtcctctggcagagacagattgccgttatcccgtatctagttcacgcagccacagccagccagaacccggtttaaaattcgccggccagcttctggatgaagaatcggggctgcactacaaccgcttccgctactacgacccgcaggcctgctgttacttaagcccggacccgatagggctggcggggggattaaacacctatggttacgttcacaatccgctaggatggatagatccattagggctagctggatgttctactcttgatcgcattattgccgatgctaataaggttgcgtcacctggagggcatataactccaaagcaagcagaaatattaaaaggtaatttaccagtagttcaaagacgtagtgctttccaaaataggttgtcacgtaaagaatttgtgagagatcaaaaatatcttatgagtcaatgggaagcgaatacaggaagagtttggcctactggggcaactccgcatcatataattccattggaaagtgggggggcgaataaatggtggaacttaatgcctacacatggaacattaccaaaccactctttacctggaatacctggcccgcacgcagcaggtggtgtgcttcgtactacagtccaacaaggtaggaaagctttaccgccaggaaccataaccgatttgagattttaatatgattgatattaataaagtgttggaagaaatagataaggcaagattcttttcaaatatgggggtgtctgacatccagaatgaaaatgttattttaattaaagatgttgaaaaggtgttcattaatccatctgatgtggagtttaatggcctttatgctagtgctgagtggcttccgacctcgccaactcaagatgacccattttataaaggtcaaactacatctaaagagcttgcagagcttagaattaaagtaaataaagcagtattaaatgcaactaaagggttacctaaagataaatttatatgcttgccacatgattttagccaggcggcaagaaatggaatatgctttgcttttaggcagtatgtatctgaaaagtatcaaaacctaggaactagatgggaggatgttgtgcggatatattatgctgggcattggcctgttggctttgctcaagaaaaaataatagctatttaatataagactagatagatccaagaaggatctatctagttatttgtaactgtggttacgccagtatattatcctgatgtacttgaatgaccacctgaccaggcatcacgctgatcgccagcggttgcccggtcaggccgcactgcgtcagccagtcctctggcagagacagcttgccgttatcccgtatctagttcacgtaaccacagccagccagaacccggtttaaaattcgccggccagcttctggatgaagaatcggggctgcactacaaccgcttccgctactacgacccgcaggcctgctgttacttaagcccggactcgatagggctggcgggggggatgaacctgtatgcctacgttaaaaaccctcttacatggatagatccgctgggattggctgggtgtaatctcaatcctaaagatattcactacatgcaaagctcaattaaaaatcaaacaggagctcatactgttctggataacgctgctgcattagcaaatggaacacttaaagctgcggatctacctgctattaaggtttggcgggatgctacagggaaaatatggactctagaccatcgaagattggccgcatttaaaatagcaggtcttgaaagcgtaccagtccaataggctacagccaaagaagttgcaggccaaatgtggaaaatgacaacaaaaactgaaggtaagagcatcattttaaaattaggtgatggaattaaacagataataggtggttgaaatggaaaatgatttatatcctgttgaaactagagatgaattaattaaattaattttatctttggcttcggaagcaagaaataatcctgatgagtgggagaataatgatcttccatcttttttagaagcgatggcttcatggatggaagacatggatggtttttataagaatatgaataagccatgcccagataatgccagttggagtgtccttgctgacgtattaatggctgccaggatctacgaataactaaaacaagccggaatgatcataaggtatcttccggcttgttttacctgtcatcatgccaatatattcccctgctgaatcctaatcaccacctgaccgggcattacgctgatcgccagcggttgcccggtcaggccgcactgcgtcagccagtcctctggcagagacagattgccgttatcccgtatctagttcacgtaaccacagccagccagaacccggtttaaatttcgccggccagcttctggatgaagaatcggggctgcactacaaccgcttccgctactacgacccgcaggcctgctgttacttaagcccggacccgatagggctggcggggggcgagaatacttacgggtatgtacataatcctctgtcatgggtcgacccattaggcttagcaggatgttctaccacacttggtaggaacatgatggaggcgatgggactgccgcgttctacgaaatggactgggcatcaagcccaccatataatcccgaaagaattagctaaccatccagcattaaagaagatcaaatattatattgacgatgccggaaacggtatcttcctcagaagagtcgatgatggcactagtgcgatggcaaggcatcagggaagtcatgatggatatacacaagcagttaaaaatgctttagataaaatagatcttaatcaatctaaaggcgctattttgaatcaagtgaaagaaatccaaggaatttctcggaaagggttagagaatggccacccaatcagaccacttgatatggataaagcaggtggtgcattaggaaatggaaaggttaatgctgtctggactaatattttcactaaaggtggctggtaatggatcaaagatacataatcgaacctattgaatttgcatttacaaatgctctctttaaagggttgtctgaagctataagccagaaggttattgttattaataatgttgatgatgcttataagtatgcgtttgagcagaacctcccatcgggttataaagtttggaatgatacgattgaacaatgtcgtaaatctttaaggaaaaataagaagttccaagaggcttatgattttgttaatggtaatcttgaaagtttacaggttaaaaatgcatcatcacttattgagtttagaaagaagagaataaagaaaacgaataccgctcatgatgactttattttctctgaagctaaagaagatgcgttttttgtattgtctacagtagcggtcaatagatacttagataactttataaaagactcctttcttgaagatatatatgcactttacaaagcaggtgcgtggccgtgtggtatgaaaggaagtgtcatcttggtttttgacccagcatcgcttagttaatattattaactctttagattaaatgtgtaaataaaagccgggaagggcctctttgggtcttcccggctatttttttatctgttgttacgtcacagattaccctgccgaaccttaatcaccacctgaccaggcatcacgctgatcgccagcggttgcccggtcaggccgcactgcgtcagccagttctctggcagagacagcttgccgttatcccgtatctagttcacagcaatattatgatcttcaatatggtcaaggtcgtaaaactaggccaactgatatccagtatgtatcaaaatggaaataaaactcttgatgatttctttaggaatatctaatagataattcaaatgttgcagtggaaaaattgattcgtttctttgatgaaatgaataaatagcaaatgagatatctcgtatctttacgagaaggtgatgagaatgatgctgtaaaagcgaaagaagagtgggggttgtatgttttttgtgcgatcttgtttttttgtttacactcttaaattctatgtaattacatccatgaatttaaatcctaaaagtgacattttccaagcgtttaaaattattgtaattaaataacgttgttgtattttaaaagtgagtctttgattttttaaatgtctaaattggcaatgatggtgttgaattttttatattttaaatctaactatttcataattatatgctgttattttttattaaatagcaagtcatttttatcgctaatggtttgatagtgacgcgctattcatctatatcattagaaagaaataaaccttgaggtcagtttgtttaataatagaacccgagaaagcaataccgatgcaataaagacggagaatagcagtgtgaatcttagggtgatgtctgataaattataggcactagagataaaatagaatatgccatcgtggagaatataaactcctatcatcgatgggctgatataagctagtgtctttcttatccattcatatttagtatcaaaattatcaaagataacaaacagacatagactcaaaatgagtacatgaaagttatcaagaaaatagccagcattaaccgttttatacacgtgcagagacataaagctctcatagaaatacatcgatatagctgtagggacgatcaatagtttagccgctattctgacttttatgtttttagtgatttctctacctttggttgaacagagaaaacgtccgaccatatagtaaaatacccatgtccaaagcctgaagtactgggggaaatcgattaaataaggtctttcggtaaaagtactgataatatcaatggaaactgaaaagattaataatccacctaaggtaaagaaggtttgcctgttatttttaagtattttagatattatcggatttattacataaataagcgcgatgctaaataacagccagctttgcaggaaataaccttttttaaatccatcttcattgatgaagtaaaataaaacgttccagaatattatgattgttaaaatggatttgatctttcttaatatatcctgccttgtgatttcttcaatcgagtcaatataacctattatcatgaaaaacagcggtgttgctataatagataagaaatagaggatactcataacctcaccgcttaaaaaacagctgtcggaacaggttttactagcagagtagaatgtgaccgcagaaaagcagctaaggctctttagcgcatggaggccgacatttctcataattgaatcgtcacataagaggggagtccagagggcaaagcgatgccctttatcatctgacttggtgcaattttttttggctgactgtgtctgatcacataccgcagtttgttcattgtcacaccttgggtttgcaacagaaaactcgctatctcatctattcattttaagatatctttgcacaaaacgaaatttctgtcaccgttcatagtgactaactgaaattcataacatcaggtaggaattttgccatcactccctcgtttattccccctttgttcttaccttttaactctattttgccaatccgttaatttttattggtgtcagagtattcctacacaaaagcgtctcactgtcctatataacctaaaaatgccctgtgttttactgattgaacataaaatccgtcggtaagatagcggccataaattaaagaatcgcttctacaaccataaggaagttgattgcttaggttctcagcaaaaaagatcgcgtattggcgtaagtttgccttgaacccggattggtgctttgcacgttgatgtggggataggcagtccgtggcctgcatggagcctgatattacgggtaaaggcatggattatcttttttgttcgacgtcttattttaggatgtgagtaaaatgataagttgcatggtggtagataatgatagatatctgacccttgggatcatatctatggttaaaaaaatatttaccggaatgggaagcaaggaagatattaagttttataagcgtccattccatccagttgatgttgtatttatcggcgttgatgaatccaacttttttgaggcgttagcccgcctagagaaaatagcgctggatactaaggttttcctgattgcggatttaaggttaagtagtttctttcagggaatccccggattccataatgtcaccatgatttatcgtgaagaaactatagacagcctagagtccaaaattaccggcgttattaaacgaacattccgtatcctcactgaagctgcatccgatcgtaaagtagatcagcatgaagtcgttcagaatgatgagcaaaactttcttacgccaagtgaaaatgccgttctggcgttgttcaatgaaggcttttccggcggtgatatcgccaaaatccttaagaagagtcaaaagactgtgagcgggcaaaagcgctctgcgatgagaaagttgggtgtaagaactgatgttgaattgattaagatgtttatgttcaagtaaagaagtttagatatacatgcgtcaacgtctattgttgacttaaacatcgggcactgaatttgcctttttgacaccgatgacaccacggtgattgctaattttaccgtcaggagtttaaggggtactcagtccccatcgataggggactggtagataagagggttaaatatttttcagcttggctacagtgctatcaatatcgatttcgtgatcggagaaggtataagtcacgttttgatgagtggttaccgatagcattttcaggggaaccgttttttccgcaatgttttcttcctgcgggcgaattttattcatcaacagtccaacagaaagcacggtattagctttatccacctctgcctgagccggtacttctttagtaaatgttttgaaagacttaatgctggtaagtttgattctctcattggcaataaaaatgtatttgctctcaatggcaactttaactgcaaaagctgataaacctttgctgttggtcgttggttcaaaagtcacttccgcatttttcttaatcatctcgggattagcaactttaataacgtgaaaataacggttatctccgttttcatcggtgataaaaccaaaacctttatcttcaaaaaaagttgttattctaccgttcatcatgtatctcgtttaagccagtctattagttgcctatgatacaggggaatgctttacagatacagcctgagacctttgccacgtttattagcattgggaatcaccatagatttggttgcaacttaggcagaaatgcaaagtattcacactgacagtgtggcagagattggtgattctatctgtttttctcttttttgtgatctacattctggacaaaacatcgttcaattgctgtactgtaattgacacggttgttgtgtccaactattcacgtaaaggtatgtttgatgtctaagattaaaggtagcgttaagtggttcaatgaatccaaaggtttcggcttcattaccccagaagatggcagtaaggacgttttcgttcatttctctgccatcgctagcaatggtttcaaaactcttgctgaaggccagcgtgtagaatttgaaatcacgaacggtgccaaagggccatctgctgctaatgttatcgctatctaagtagccaatattcttaaaaacccgccccatgggcgggtttttttatggctgaaaatagagccagagcccgttttcgatgattacagtatgagatgaccgtccgataaaacctgggtctggttgttgagattcaggcagtgaggctacagctcatcttaaacgttatcttgaaatactagaataaataaaccttcaggaatgccagcgagatcaatacgcaaaggccaaccatcagtaattctgttagtgttttaggtgatccaaacatgttatttatcccgcgtttcagtgcattaaggtgaaactgttctcaggatacggattatctaatttgaaacttaagaaaacattaaggggataaatagcgcacttaaaagtgagaggagtccccgatttttgcttttttactgtgcgctccacatgttcactaacataaaggccagcattgtcatagctaacgaacccgccagattgaataatatagtcagcccggcccaaatgaatttactgtcttgtagcaagtacaccacttccagcgaaaaagttgagaatgttgtcagcccgccgcaaaagccagttgttattagcattttccaaactggatcaaggtgcgtcattcgattgaataaggctaatgtcaggccaataataaaagcgccaaccaggttaacagtgagagtgccaataggtacgttgggagataacccgtttaatttcatgctgataagccaacgtagcgtactgccaacgccaccgccgataaagactgccagtaatgtggggaacataaacacctttcttgttatcagggagtttgcagaaaggcttaggcgtaattctacgcacctttctgagaaggtaacgtagacatcatcagccttgaggggcggttatggaggaatgtcatctccagagctttaattggatattacactgactttttcttattttaaaccctgaaagtttggtagcctattcgcgattacatcgtgatacttaaatgaccaaggaacaagcgtgaaaatccgaaaggtgaaacccggtgacgaagctgccatctctgaattattgatagcattagattatgcaggaacagatggttttttaaaccagcgtttgctacagcttattgggcatcccgatagcggtttgctggctgcgactatcaatgatgttgtttgcggttttatttcattgcattttatcccgcagatcgcgctggccggtgatttctgtcggatcagttatttatgtgtgagtgagaaggtcaggggagcaggaatcggtaagcaacttctggatgaagctgaaaagatggcgcgcgaacgtggctgtgatcgtatggaattacacagtcattcccgtcgagtgaaagctcatgctttttatctgcgggaaggctatgcagaatcaccgaaatattttaccaagtgcttaactgaataggtatttagctcgctagctcaatacggtctctgccattatctttagcgtgatataaagcggagtcagcggcttttaaccactgttgataattggtcatttctggtttgaattctgatacaccagcgctgactttgagctgcagccccggcgattgattaaagacaattccagccagtttttcctgaatacgccctaatacctcgcaggcctgttccgccgaagtattagggaggatagcgccaaattcatccccgccgtagcggccgacgatatctacggctcttagccccaataatagctcctcggcaagcgccgtaatggcatcatcaccaaccgcgtgaccaaaagtatcattgatggttttaaatttatcgatatccagcagcaccaaggacgcgctgtgtttatagcgacggcagctatcaaactgattatgaagctgatgttcccagtggcgtcggttatacagcccggttaatccatctctcacgctaatacgcaaaagctcctctttgttatctgccaggcgtttggctgtgcgatacgtcacccaaccaagtaacgatggataaataaaaatcatcggtaaacagctatatacctgaattggtgtggtttgcggctggaaaggtagttgaaatatccaggcgaccagtaagcaacctattatctgtaggccaaggcctttaagaaaaaaagattttccgcctgatgcgatattgttcatgctcatcatcgataagatgaccacggagggcagggcattaaacgacattaccgccacccatacgccgcctgaaatagaatccaggcttaaattcagcatttcctggcgatgcggggaattggctcgaagggataattgataggctaggtgtggccaaattaacccgtttatgactagcagtgcccacatccacaacggagtttgtcgggtgattagcactgataagacgcataacataccgatacccaagccaaatatccggggtaggtagatgcggcgggcaaaactcaatccggcctcgcgcgaatttgctctgctatataaggacaattgacgcgctccgaataaatctgattttggggaatgttaaagaatcgacattcagcatgagtcagaatttaattaagcagactcctgcataaatcatagttcaggaacgaaatctgttacatattactgttgttttatccggtattttattcgtaaataatccacaattaagttaatcctattttgagtcctgaacgaataagaaggtatgtatggaaggtatcagtattaccaagctcttagtggtaggtatattgattgtgctgctgttcggcaccagtaaactgcgcactttgggggctgatttaggtgcggcgctgaaaggctttaaaaaagcaatgggcgatgataaagctccgccagccgatatcgcagaaactaaagttgtgccgccggtagagcataaagactagttctagttttatttactgcatggaaattgcagatggtctgaatgaaaacggatatccaggtggagatccgtttcaggctatttgcgatttgagttgtaataaattatgtctatttaacgcggtttttcgcaactaaaaaccagcccagatatgaattcaggcttatatgattatttgacttcctcgcctttggcttgcaagtccgcatgataagaagagcggacgaaaggaccacaggctgcgtgggtaaagcccatagccatggcttcggctttcatctcatcaaactcatccgggctgacgtagcgctgaaccggtaaatgatggcggctaggctgcaaatactggcccaaagtcagcatggtcacgccatgacgacgtaaatcgcgcatgacttcaacgatttctgcgttggtttcacccagacccaccatcagaccagatttggtcggaatatttgggtgcgcttctttgaaacgttccagcagcttcaatgaccattcatagttagcgcctggacgaacctgacgatagacccgcggcacgttttccaggttatggttaaacacgtcaggcggcgttgcagtcagaatatctaatgcgcgatccatacggccacggaaatctggcactaatgtttcgatcttgatcgttgggtttttggcacgaattgccgcgatacagtcagcaaagtgctgagcaccaccgtcgcgtaaatcatcgcggtcaacggatgtgattaccacgtaacgcaaccccatatctttaatggtttgcgccagcttttctggctcgttggcgtctggcagagttggacgaccatgcgctacgtcacagaacgggcagcgacgagtacagattgcgccgaggatcataaaagtcgcagtgccgtgattgaaacactctgacaggttagggcaagaggcttcttcgcaaaccgaatgcaggccgtttttgcgcatcgccgctttgatgccttgaatacggctggaatcagcaggaagcttgattttcatccactcgggtttacgtaacagctcctggcgttcagtcaccacggttttcaccgggattaacgccattttatctgcatcacggtattttacgccgcgttccatctgaatcggtttactcataatcgtgcaggttccagttctgaatctctaatatgagatttttcattaaaatcaacgaaatgagacattcgttaaaaattatttgaaaattgtttaaaaattatatcatctttcccccgattcgttcagcccccaattttgtatgagtttgtgctttcaggtagcagaatcctacgggagaaaccttataaaggatgataatcctctgcctgccaaggctgaagaacggcatccacgtagcccaattggcgaataaactcttgcaccagaatgggttgcacatcgctgagcgttgttcctggccggtatgcactcacttgtgtcatctccataccggcgttaccgcaagggtttatgcgctgaaacggtgacaaatccatatcgatattcagcgctagcccgtggaacgagcagccttgacgaatacgcaaacccaaagagcagactttcttttgcccgatatagacgccgggcgcatctggtcgggcgtgggcctcaataccaaagtgagccaaagtttctaccacggtattctcaatcgcggtaaccaactggcgaacgccgatctttgcacgtttcaaattgatcagaacatacattacctgctggccggggccatggtaggtaacctgtccgccacgatcgctttgaatgacagggatatctcccggcatcagcaggtgttcggctttcccagcttggccttgcgtaaatacctgatggtgttctactagccagatttcatctggggtagtttcatcgcgacattcagtgaaggcgtgcatggcttgagatacaggtgcatagggttgtagccctagctggcgcaaaatgatcttgtgttgttgcaagcgagacatcatctggttacagaaagggtggcgtcagtataccagcaccaccgcagggaaccagtgttgaccggtgaaaaaacggaagtgtgataataattacgcatgaatcacggatatatagataaaataaggcccgagttaattcgggcctctattcgttttttacgcggtgttacagcgcaaaaatctatgggtatttatattgaatcaaatagatatggtttaaattacagaaccatacgaaccagttcaattttacccagttcttcatacagggtttctacctgctcaatgtgttctgcattgatggtgatagagacggagtgatagttgcctttgctgctcggttttacctcaggggtataatcgcccggagcatggcgctgtaccacttcaaccacctggtcaaccagctgtggttcagcaatgcccatcaccttgtaggtaaaggaacaagggaactctagcagttcgttcagtttagttttcatgtgcgctcctgggttgcgaccggacagttgataaggcgaaatgcaaatcacttccggcattaaaaattataactcccgccggagcgggagcttcataatatttataatatgggggcagtcttcagactttcaagcctgtgaccttagccgaaccaatggtggaacatcagtttgatgtaatccaccatgcggctgaagaaaccaccttctttcacttcgttcatcaccaccagcgggcgttgttcgatagttttgccgtccaactggaagttgatgctgccaactacctgattttttgccaaaggtgcgtggatttctggcgtgttcagcacgtagctggctttaagatctttcatacgaccgcgcggaatagtcagataaacgtctttatcaacgcccagctgtacgcgatcggtgtccccgaaccagactggctcagaagcgaactctttaccgactttcaatggcgctacggtttcaaagaagcggaagccccatgtcagcagttttttgctttcggtttcacggcctttgtaggtgtgaccacccagaaccgcggaaatcaaacgcatctggccttcggtagcggaggcaaccagattgtagccagcggcttcggtatggccggttttgataccgtcaacgttcagactggtatcccacagtaaaccgttacggttcatctgacggatattgttgaaggtgaattctttttctttataaatggcgtattcgtctggaacgtcgcgaatcaatgcctgaccaatcaacgccatatcacgagcggagctgtattgaccttcggcatccagaccgtgaacagttttgaaatgggtatttttcaagcccagcgcattcacatagttgttcatcagattcacgaaggaatcctgactgccagcaacgtaatcagccatggccacgcaggcatcgttaccggattgcagattaataccgcgagtcagtttggagaccggaacctgatcccccggtttcaggaacatcaatgacgaaccctggaataccggattgccggttgcccaggcgtctttgcctacggtaaccatgtcttcggggccgattttcccagatttgatcgcctggccgataacatagctggtcatcattttggtcagactggcagggttacggcgcgcatcggcattcatttctgccaatacttttccggagttgtagtcaatcagtacataagcttccgcgtcgatttgtggcacgccgggaatcatggttttcatattgacgtcgtcggcgttagcaacagaagctgcgctcatgacgataacggtgccgagcgttatgctcttgataaaacgagaagtagttacatatttcatgatcaggacaacaacatccgtggggtaagttaagaacgtgccacactatagcagatgaggtcttggcagacatcaggcaatccccatctcttgcggcgtttacacatttttacgtgtgggtggcaacccgacattttaaagcctaaccttctgtttatacacagattaggctctaatttttcttgaaacagcaaaattgctacaaggcgtttccaaaagaatcagatagccagttattatggctaactacggcgcagtgatgataaatgactgctgctgcgcttctgaagataaacgctgttgcagttctgcggcctgttggcggctgctgaacgggcctaactgtacccgatgaacgtttccagcgctggacactttacccggtacgccaaaacgttggctcagagcctgctgccaggtagaggcgcgctgggcatcgcttaatgccccaacctgcacgatgtaagcaccggaagctgaagcggatgatgccgcaggagctaccgaggttatcggaccgggaggactgaccaccggcggcgttaccggctcggcgctttccagcacgccggaaggcaacgaggacggcgcacgtaggaaaccgctgctttgcgcggctacgggctgcgcggcatcggcaccggataagttgctgttttcaattggacgaaccggcgcgtcgttgacgggggcgtcctgctgaatggggttgcccatcgctccagacgttaaatccgggcggcttggcagagcgtagctttgcttggcaatagtggtcccaaccatacctgggccggagagggaaccgtcaggtgaaacattgataaaatcaattttcaccttggtattgttagagatattcaagcgatctgctgcagctttggataaatcaatcacacgtcccggagtataagggccacggtcattgacccgcaccacgatttggcggccattgctcacgttggtgacccgcacgtagctaggaataggcagggtagggtgagcggcggttagcgcattaggatcgaaagtttcgccggtggcagtcgtgttgccattggcttcttcaccataccaggcagccagaccggtctggctgaagttttgcggatctttgatgacgctataggatttcccgttcactttgtaatcctgattaaaattaggattaaaaggttcataacgaggttccgctccgccgatctcttcaatcggcccattataagtctgctgagtttgttctataggtgcttgattttccgtagtacaagctgataacagcacgctgacgacgccgatccaaagccattccttacgcattgctcacctctataaatttttagataacatttttcgatgagtatgtatcgacatcacgataccaaacccggccatcaggactatcagcgccgagccaccgtagctgaccaaaggcaaaggtacgccaactacgggtagaattccactgaccataccaatgttaacaaacacatacacaaacagtatcagcatcagcccaccgaccatcactcggccaaaggtggtttgcgcatgagcggcgattaccaacccacgcataatagtacaaagatacagacccagcagaaccaatacgcccaccagacctaattcttctgctaataccgcaaaaataaagtcggtatggcgttctggaaggaattctagctgggactgagtgccctgtagccagcctttacccactaaaccgccggagccgatagcgattttggattgaataatatggtagcccgcgcccaatggatcactttccggatccagcagcatcatgacgcggtcttgttggtaaccgtgcatcaggaagaaccaaagtatcgggataaagcaggcgaccagtacggcggcgatggcaatcaaacgccaactcattccggccaggaacagtacaaataatccggacgctgcgaccagaattgacgtcccgaggtcgggctgagcagccaccagcagggttggcataaagatcagaatgagtgcaataccagtattttttaatgttggcggacaaacgtcccggttcataaagcgcgccaccatcagcgggacggcgattttggctatttccgacggctggaagcgcacaaagccgagatccaaccagcgctgtgcgcctttactgatttggccgaaggcatcgaccaaaaccaataaaatcacgcaaacaatatacagataaggtgcccagctttcgtagacgcgcggaggaatctgcgccattacgatcatcacgcacaggccaatggcgatttggccgagcttgcgctccatcatgccgacatcctgtccgctggcgctccacatcacgaaggcactgtaggccagtagcgaaagaatgcagatcagaaacggtagatcgatatgcattttggaccacagagatcctttttgttggcgttcagtcatgatgtaccttaatcaccttcagtgccgggaggcgtcggtgccgcatccggtaattcagtattattatcacctaacagtatgtgatcgaggatctggcgggtgatagtccccacagcaggacccgcgccgccgttttccagaataatcgctacggctaccgtcgggttatcataaggggcaaaggccgtcatcagcttatggtcacgtaaatgctcggccactttgtgcgcgttataggtctcatagctgtaaacctgcgcagtacctgacttggctgccgctttatacggtgtaccttcgaaaaatttacggcctgtgccgttcgggcggttggctacgccatacataccgtctttcgccagttcccaaaagcctgagtgaatatcgccaatctggatctgtttttcctgacgataaggcaccagcacgccgtctactttggtatttagtagcaaatgcggatttttcacatcaccgtcattgattaatgtcatcaacgcttttgccatttgaatgggtgttgccgtccagtagccttgaccgatacctacgggaatagtatccccttgataccaaggttttttatggcgcttttgtttccattcacgcgttggcatgatgcccgcacgttcttctgataaatcaatgccggtatattcgccatagccgaatttgctcatccattcggaaaggcgatcaatccccatgtcataagcaacctgatagaagaaggtatccgctgattcttcaatggctttggtgacattcaggcgcccgtggccccattttttccagtcgcgatagcgtttttctgagccaggtaactgccaccaaccgggatcgaataggctggtatttttattgatcacgcctgcgcttaaagccgaaacggcaatataaggttttaccgtagaagccggcgggtaaacgccttgagtcgcgcggttgatcaacgggcggttcgggtcattgagcagaccctgataatctttgttggaaataccgtcgacgaacaggttcggatcatagcttgggttggataccagcgccagaattccgccggtgcgcggatcggtgaccacaaccgctgcgcggctaccgcttagcagttgttcaatataggtttgcagatgcagatccagcgtcaggtaaatatctttacctgcctgcggcggttgctcatgcagttgacgaataaccctgccacggttatttacttctacctcttcataaccggttttaccgtgtaataccggttcgtaatagcgttctatacccagtttgccaatatcgtgggtcgcggcgtaattggccagaatgccttctttatccaatcgctcgacgtctttgtcgtttattttggatacgtagccaataacgtgagtgagtgcggaaccgtaaggataaaagcggcgttggtagcctttgacttcaattccgggaaagcggaattggttaaccgcaaagcgggcgacctgaacttcggtcagcggcgttttgacagcaatagaggtaaagcgtcgggaacgtttgcgttctttttcaaagttcgcaatatcttcatcagtcagatcgacaataggacgtaatgcatcgagagtcgcttttagattctcgattttctctggcattaattcgagctgataaatcgtgcgattcatcgccaaaggaatgccattgcggtcatatatcatgccgcgactaggagcaataggaaccagttttatgcggttttcattagaacgggtgcggtaatcttcaaagcgaacaatttgtaaattgtacaaattggcgatcaacaccccgataagtaaaacaatacctagaaacgccacgagagcgcggcgcacaaacagggctgattcagccgtatagtcgcgaaaagggttacgttcttttttcatcccgctaaacacttactctggtcaaagtcaccacgttgctcaggctgatcacccgattattcccggtggtaaggatgattggtcgtaatactccaggcacgatacaggctctctgccaccagtacgcgcactaaaggatgaggtagcgtcagcggagagagcgaccagctctgctctgctgcggctttacaggccggagccagtccttccggcccgccaataagtaggctgacgttgcggccatcctgcttccagcgttccagctgatgggctaactgaggagtttcccagggcgtgcctgggatatccaaagtgacaatgcggttgtttttaccgaccgccgccagcatcagttcgccttctttttccagaatacgtttgatatccgcattcttgccccgttttccggccggtatttctatcagctcaaaaggcatgtctttaggaaaacggtgcagataatccataaagccggtctgcacccagtccggcatcttagtgccgacggctaccagttgcagtttcactctttagccccagagtttttcaagttcatacaggcgacgactttcttcttgcatcacatgtacgataacgtcgcccagatcgacaacgatccagtcagatacgccctggccttcgattcctaatggaatcatgcctgctttacgggattcttgtaccaaattatcggccaaagccataacgtggcgggtagaagtaccggtacagataatcatgcaatcggtaatgctggatttacctttcacgtcgatagaaagaatgtcttggcctttcaagtcatcgagcttgtcgataacaaattcttggagcgctttaccttgcaaaggttccccctcaggtgatttatgtccataaccttcgctgataatacgtttcgccggaatttcttctcagcacgcaatctgttacgagtggttatgatgtatttatcggcaggatgccgctgaaagccagctgtttactgcaattgctacaggggttttcagcgaatacctaaaattaagcggcgaagtatatcatgggactaaggctcgcgatataaaccctgtaactcgatgtatcgctgaattgcgcgcggtaacaggtcatcacagcttagtccttcacgtcgccgccggcgaatctccgtagcggatatatccaaaagtggagtatctgccagatagataaagccattgggttgctggctgagtttttctggttgcgtaacctgatgttgttccagccagttttgaagctcaggtgtatccagcttcttggcataaccgggacgagcgcagaccagcaaatggcaaacatccaacagcgattgccagcggtgccatttatgcagagataataatgaatcctgaccaatgataaaagccagtgctagttcgggaccgcgttccgcacgtagcgattccagcgtatctatggtgtaagacggcgtggtgcgctgtagctcgcgatcgtcaacctgaaatagcgggtttccctcaatggcgagctttaccatttccagccgttgttgcgcagaggcttccggctgtggccgatgaggcggaacgtgattaggcagcaaaataacctgctgtaatcggacttgctgcgccaaagcttccaccggacgtaaatggccgtaatggatgggatcaaaggtgccaccaaacagagcgtgtaagctacgctctggtttagcgctatcagcctgcttatccagcatcaaagaaactctcaggtaaggttttgccacagatcagcatggaaagtgactctaactcaggccagacagactgaccgtagtcctgcttgaggcgaatctccatttgcgttagcaaatgcacactgcgctgtaattgttgcaacgtgagacgctgaagcgcctgtgtcatcagatgacggcggttttgccagactttatgctgatcgaatagggttcttagcggcgtcgtcgccatttgccgttttaagttcagcagtagcaacagttcacgctggatggtgcgtagcaaaataataggttcgctatcttccaaccgcagttgctgcaaaatatgccaggcccgcttacttttccccgccagcaatgcatccagccaatgataaggtgtgaaatgcgccgcatcattgacagcttgttctacgcgcggcagggttaacttgccgtcgggatagagcagggagaggcgttccaatgcctgggataacgccagtaaattaccttcatagcaataacaaagcagttgaatagctgcatcatcgacttcgaggttgagacttttggctcgggtttgaacccagcgaggaagctgagcctgttccggtgtctggcagctgattaatgcgccttttggactcagagctttaaaccaggcgctgttttcctgcgctttggtgagtttgttggcacgcaatatcagaagaatatcggggtgtagcaggcttgtcagtttagctaactgttcgttcatagcggcggttaaaccactatcagggaataccagcagcagagtttggcggctggagaacaggcttagagcctgacaaatgctgaagatattctcccattcggtatgggtatctaacgctacggtgtaatgttcggtaaaaccttgctgcgatgcagcctgacggatgcgatcctgactttcctgtaacagcagcggttcgttcccacacagcagataacaagcgcgcagcccctcttggagctgcgcggcgagttgttcaggataaatacgaatcattgggcagaggcaactggagtcactgttttggccgtagccggcttagcgtcttcttcctgtgcctttttcacttcttcagcgtgtacggtcagtaatttccgcactaactgttgagcggcctgctcacgcatttcctgcgcaatgatgtcactttctgccgtttttgctaacgcggttaacgggttatcaaagaaggagcggaaaacggtcacattcaacgggtaaatatcgtgcccaggaatcagcacctgcgcctgaacattcagtaccatttggtattctgcggtcacgccgttctggaacaccgaaacggtgtcctgactttgcgacgatcccaaaatacgcagcgtcggcagatccttgcgcatcgcatcgtcaacaatggagacgttgcttagacgcagctgttgacgaatagagcgcgtcaatggcccataaggatcgctgctttgcagcaacattttttgcagttcctgaggcacttgtgtagtgccccgcagatgaaaaccgcagccagcggtgaccagcaccgctaaccccagcaacagcgtcagaatacgatgtcgcacaactcctccttgtcttaacctacaaccaggttaagcagtttgccagggacatagatcactttacgaatcgtaaccccatccagatattttgccaccagacgctcctgacttgcgcactcgcgtacgtattcttcagttgcatcggctggcacggtgatcttgccgcgaaccttgccgtttacctgtaccacgactaacttggaatcttcaaccatggcctgctcatcagccattggccaaggagcggtatcgatatcgccttcgccgcccagttcctgccacagagtgaagcagacgtgaggggtgaacggatacagcatacgtaccacggccagcagtgcttcttgcatgaaggctcgatcctgctcggtttcctgcggcgcgcgacccagtttgttcatcagctccatcacggcggcaatcgcggtgttgaaggtctgacggcggcctacgtcatcggtcactttagcaatggttttgtgcaaatcgcgacgcagtgatttcagatcttcagtcaggctggcgatatccagcggctgtgtagcccctttgctggtgtgttcaaacaccaaacgccatacgcgcttcaggaagcggttcgccccttcaacgccagattcctgccattccagcgtcatttctgccggagaagcgaacatcatgaacagacgaacggtatccgcgccgtatttttctaccatgacttgcgggtcgataccgttgttcttcgatttcgacattttgctcataccggcataaaccagttcatggccttcgccatcaacggctttagtaatacggcctttgtcatcacgttcaacaatggcgtcaaccggagatacccagatacgctcgccgttgctaccggtgtagtagaaggcatcggccagaaccatgccttgacacagcagacgcttggctggttcatccgaatccaccaaacctgcatcgcgcatcagcttatggaagaagcggaagtacatcaaatgcatgatggcgtgttcgatgccgcccacatactgatcgaccggcagccagtagttagccgcagccgggtccagcatgccgtcatcatattgcgggcaagtgtaacgcgcgtagtaccaggatgattccataaaggtatcaaaagtatcggtttcacgcagacccggcaatccgttaacagtggtttttgcccactcggcgtcggctttgattgggctggtaatgccgtccataaccacgtcttcaggcaggatcaccggcagttgatcttctggtgttggaaccacggtaccgtcttccagcgtgatcatcgggattggcgcgccccaatagcgttgacgggagacaccccagtcacgcaggcggtagttcactttgcgttgacccacgccaagcgcgaccagtttatcggcgatagcatcgaaagcagcttgataatccagaccgtcgaattcccctgaattgaacaaagtgcctttttcgggcagtggcgcagcgctcaaatcaggcgcggtgccttcggcggtcagaattaccggctgaattggcaggttgtatttggtcgcaaactcccagtcgcgctgatcgtgacccggaacggccatcactgcgccagtgccgtaatccatcaatacaaagttagcgacccagatcgccacttcttcgccagtcaacggatggatagcagacaggccggtggccatgccttttttctccatggttgccatttcggcttcggccactttggtgttacggcattcgtcaacgaactcggccagcgccgggttggttttggctgcttctagcgccagcgggtgaccggcagcaacggcaacgtaggtgacgccaaagaaggtatccgggcgggtggtgtaaacagtcagtttttccgcactgttagccacgtcaaaggtgatttccaccccttcagaacggccaatccagttgcgctgcatggttttcacctgctctggccagctttccagcttgtccagatcgttcagcaactgatcggcataatcggtgattttgataaaccactgcggaatttctttacgttcgactttggtatcgcaacgccagcagcagccgtcgataacctgttcgttagccagaaccgtcagatcgtgaggacaccagttcaccgcggaggtctttttgtagaccatgcctttttcatacagcttggtgaagaaccactgttcccaacggtaatagtcaggtttacaggtggcgatttcgcgatcccagtcatagccgaagcccagcagtttcaactggttcttcatatattcgatattgtcgtaagtccacggagctggcgcggtgttgtttttaaccgctgcgccttcagctggcagaccaaatgcatcccagccgataggctgcaggacgtttttacccagcatacgctggtagcgcgaaatcacgtcaccaatggtgtagttacgaacgtgacccatatgtaggcggccagacggatatggcagcatagagagacaatagtatttctctttgctcgcgtcttcagtcactttgaaagtttgcttcttttgccaatgaagctgaacgtgcgattcgatatcttccgggcggtattgctcttgcatggcagccaatggtcctatagtgaaaacagctacacctgtagcatcatctgtttaatatcataaagtgagatccgcatagcatagctgataagcggcagccgcaacaacactctacgggtcactgtcgcgtttttctgcgcgacctatagcatttacgggcagagtgaggacggtcacaccctaatgatcgcgtgacatcaggtatttacggctaaaataaatagagatacctttaattatcaggcgaaagataagctttatcacaggttactcgaggagactgtatgaacaaggtggctcaatattaccgtgaattagtggcatcgctgaccgagcgcttgaaaaatggagaacgggatatcgatcaactggtcgccagtgcggaacagcggctgaacacggtagaagatttaacgcgcagcgaagtcgatcagattactcaggccgttcgtcgggatctggaggagtttgctcgtagttacgaagaaagtaaggaagagtttaccgatagcgttttcatgcgggttatcaaagagagtctgtggcaagaattagccgatattaccgataaaacccagcttgaatggcgcgaagtgtttaaggatgtcagccaccacggggtttatcacagtggggaagtggtcgggttaggtaatctggtttgcgaaaaatgccaccaccacttagcgttctatactccggaagtattacctctttgcccaaaatgcggtcacgatcagttccaccgtcgcccattccagccataaccttcacttctagacactccgcctgcgcggagtgtcataaaaccattattttccgtagcgagacacgcgctcaaccagtaaatcaataaaaccctgccgatcaatatccatcaatatttgcgtattggccggttttcccgtcaattgatagaaatccgttaccgtcatgccttgcgtgtatttgccctgagtctctattccaacccaacggtcaacgctttggaacagctcgggagccaagagccaggcaatggtgcaaggatcgtgcagtggcgcacctttaaagccccagcgttcctggcgatgataaagcataaagaaatctaatagaccggcaaccacgtcggccaccggattgccaagctgacggaaacgttcaatatcctcgctcattacctgcgctttatgggtgacatccaacccggccatggtcagaggaatgccggattggaatacccgttcggcggcctccgggtcgacataaatattaaactctgccgctggcgtccaattgcccaacatcaccgagccgcccatgatcacgatgcgttcgatttttggcgtcagttcggtgtgactggcgaggaataaagcgatattggtcaaaggacccgtggctaccagcgtgacgggacgcgggctggcgcgcagaactctggctatcagttccaccgcattttccgcttgcggcgcaaaatctggctcaggcaaaaccgggccatccagcccactttctccgtgtacgttatcggcgatgataagttcgcgaagcaaaggtttttgcgccccaccggccacgggaatatctcgacgtttcagcaaagtcaaaatgcgcagtgcattacgcagcgttttttccggtgtttgattaccggcgctggtggtcacagctgcgattttcagttcgggggaggcgagagccagaatcagtgccatggcatcgtcatggccgggatcacaatcgataataatagagcgggacatagggtttcctcttgttgtttctatttgttgtcgacaatggacaaaatagtcaaaagaggcaataaacggcactgaaaaacaagaggggatatccgaatcctcccccgaaagggaggataattattggctaggccttagtgcagaatcttggcgaggaagtctttcgctcgctcagatttaggattgttgaagaaatcgtccttattactgtcttcgacaattttcccttcatccataaagatcacccgatgcgccactttacgggcaaagcccatttcgtgagtgactaccatcatcgtcatgccttcgtgagccagtttgaccatgacgtccaacacttcattgatcatttccggatcgagcgccgaggtcggttcgtcaaacagcatggcgatagggtccatgcacagcgcacgggcgatggcgacgcgttgttgctgaccgccggaaagttgagatgggaatttgtcggcgtgagtcgttaacccgacacgttccagcagttttagccctttttcccgcgaggcggctttatcgcgtttcaatacttttacctgcgccagcgtcaggttttcgatgatcgataaatgaggaaacagttcgaaatgttggaaaaccatgccgactttggaacgcagctgagccagattggtgcctttatcattcacggcgataccgttaactaaaatattgccttgctgaataggttccagcccgttgacggttttaatcagggtggacttgcctgagcctgaaggaccgcagactaccacgacctcaccttttttaacttcggtggagcagtcgctcaaaacctgaaagtgaccataccacttagaaacatttttcagggaaatcatcaaacagtccttttcttcaaatagttaaccagcatcgacgccgcaatactgataacaaaataaaccaaaccggcgaacagaaccatttcgacctgagtaccgtcacgctcaccgatggtggtcgcggtgcggaagaaatcggccagactaagcacatacaccagcgatgtatcctggaatagcacgatgccctgagtgagcaagagcggaaccatcgccctaaatgcctgaggtaaaataaccagacgcatcgattggccttgggtcatccctaaagccagggcggcggatgattgtccgcgggaaatgctttgaattcccgctcggataatttccgagtaatacgccgcttcaaacagggaaaaggctaccatggctgagatcagccgaatatcggtttttggcgatagcccaagcacattttgtaataagcttggaaccactagatagaaccacagcaataccatgactaaaggcactgaacggaatagattgacgtaaagggtggcaaaccagctgatcgctttgatcgacgacaaacgcatcaccgccagtatggtgccccacagaatgccgaaaacgatagcaataacggtaattttggccgtaacggccagcccttgtagcaaataaggcatgctgggcgcgatggaactccagtcaaattcgtacattatttactccccaaattgccgggtaactgcactttcttttccaccaatcgcataatcagcatgataacggcgttaattaagacataagccaacgtgatagccgtgaaggattcataggcatgcgcggaataatccagcagtttaccggcctgcgccgccatatccaccagacctatagttgatgcaatcgccgagttttttaccagattcagcatttcggaagtcatcggcggaatgatgacgcgataggcattgggcaataatacatagcgataggtttgcggcagagtcaggcccatcgccagcccggcggccttttggcctcgcggcagggattgaataccggctctaacctgctcacagacgcgagccgcggtgaacagcccaaggcatagcatggaagaaaggaaaaactgtatattcgggtctagctcagttttaaaccacatgccgatatgggtcggcagcagttcgggaaccaccagataccaggtaaagaattgcacaatgagcgggacgttacggaataactccacgtaacaggtaccgattgatgacagaagccgattggggacggttcgtaaaataccgaacagggaaccgacgaaaaaggcaataacccatgcgctcaacgacagcgcaaccgtgacctgaaaaccagaccagatccagcctaggtaggtggtgttaccgaatggggcgggttgaaggaaaatcccccaattccagtctatagacatagctaactcccttaaaagggtggagaaaccaccctgaagactgatgatgaatagccgcaccgcgctgaccaaaaggaaacaaaaaaatgcggagtggggaacggccaccccgcatcctgtctaccaagcggtcatcatcaatcaccaggacagcgtactgccccggatattatttttagttcaatgccttgtcgttaggttctttgaacagctttttcatgtcatcagacagagagaaattcaggttcagatttttcggcgggataggctgcgtgaaccagcgctcaaaggatttggttgctacgccagaagtttgcgcgttggcaatggtttcatccattaacgctttaaactgcgggtcatctttacgcaacatacacccgtaggcttcctgagattgcggtgtacctacaatctcccaatcccctgatttcttggctttggcgcgttcaccggccagcagagcgtcatccatcataaaggcgacggcgcggccgctttccagcgtacggaaggaatcaccgtgatctttggcgctgataatgcgcatgttcattttgttttcttcgtttaatttgttcagcagcacttcagaagtggtaccggaagtcactaccacggctttaccagccaagtctttgaaatctttaacaccagagtcttttttggtcagcaaacgggtgccaaccacgaagatggtattggagaatgcggcctgtttctggcgctcgacattattggtggtggaaccacactcaaaatcaaaggtgccattttgcagcaatggaatacgattttgtgacgtcacgggaatcagcttgacctgtaaatccggcagattcagttttttcttcaccgcatcgacgatcaggttggagtagtcctgtgaataaccgaccactttctgctgattatcgtaataagagaagggaacggaagactcacgatggccaacgacgatcacgccgttatctttgattttcttcagcgtgccagccagttcttccgcatgggctacgctacttgccattccaactaacagtagcgataacgccagtttacgcatttgcatggtccaactcctgtgatgttatggtgctgcttgatgttgtgatgctgaaatcgtcttatctgaattgggtatatgacgaaaaaatcattaccgctttattaacgagcgatctcttcacttacttgtaacagattatcgcgataaaaacgtatcttgttatataaatgatattaaaatgtttgctttttgagacggaaatcgcaccaaataaaggcaattaaacaaagatgcaccaagttcgtgctgtaaatgcgctaaatttgtgcaataaaacggccagccttggctgagaataagaaaaccgaggaataacgaccagaatcacaaggaatattgcaaggcgtgtgccaattgtggctctcccgcgggaaacgggagagaaaatgcgggaaaaggcgactattcggttggagtgatctgttgggtaatagctaaatgggctttaaacacctccagcgccgatggaagctgttcttttttgagctgtttttccgggttccacagctcggcaaaagtaatggctcggccacagtgaataaagacttcggtaacctcgatcaccagaacgctgcgcgcgggctgcccattttgtgcaaagcggttgcacagttctggatcaacgctgatcttagcgcggccatttactcgaaaaccttcattccagccgggaatcaggaacaaaataccgaggaatgggttttgcagcagattacggatgccgtccagacggttatttcctgggcggtccggaaataataaggttttatcgtcttcaacatgcataaaaccgggttctcctcccttaggtgaacagtcaacgccgttggcaccaaaggtacctaaaatggcgaagggagaagcagcgatcagctttcgggcatagctatcgagatgatcaatctgcttttgcaccacgtttttattaggcgacgcatagtgctgactcaactgatcttcagttgtcaggataaattctggattcagttgcatacagtctcagttaatgattatgctaattattcgtattgatgagaacgataacagccgccatgccaatgcgcaatattaacgcaatacgggtaataaggccgcaatccgcttaaacagcgctattttgatacaaatttagcaaacatctcgtgccgtaatggcgttagcttgatgaaatttttgatgtttgacggggaaatgaatcgccgcaacgcagagatgctgcggcgattttttacgttgaatgaaccaaggatgcgttcggatcgattaattcttacctgaacgcgcgacgaaacccagtgtgatcacaccgaaaatcagcgtaatcacccagagtggccagccgccaaaacgggcataaggcgtcagaccggtggttggtgtcactttcacttccagcacctcgcgcgtgaactgcgggatctgagccaatacgttaccgtcagctcccaccgcagcggtgacgccgttgttggtgctacgcagcagaggacgacccagctccagcgctctcatgcgcgccatctggaaatgctgccatgggccgatggaatggccaaaccaggcgtcattggaaatggttagcaggaaatccgaattcgctttgaaattatctctcacctgttggcccagaataatttcgtaacaaatcgccgccgtcatatcaaaaccggctacggtgacctgtggttgcacatagctaccgcggctaaatgaagacattggcaggttgaataagggtgccagtggccgcagcagggcttccagcgggacatattcaccgaaaggcaccagatgatgtttgctgtagcgatttagcgtcggatattggtagggctctttatcgccgagcacaatcaggctgttaaagaaacggtagccatccggcgtattgcgagcgtcaacaataccggtaatcaggctactgtgattggcgcgcatcaagctgtccatcatggtcaggaaggcagtttgatcggtttcaatatcgggaatagcggattcaggccagataataatcggcgctttgcccatataaggttggctggcattcaaatacacttgcagggtatcgatcagtgccttcgggtcccactttaacgattgagcaatattaccttgcaccatcgccacattcacagcgcgttccggctgaggggtaaaccagtgccattggcgcagcggccagggcagcagcagtaatgccgtagcaataaccgctggcagccagcgtcgctggtggatcgcataagccagtaatccactgatggcgaccagaataaaggtaacgccatcgacgcctaaaatcggcgcaatgcccttcagcggcccgttaatctgggtataaccgaactgtagccaagggaaaccggtcagcacccagccgcgtaaaaactcgctcagttgccataagacaggcgcggcaatggctaagcgccaccaggtaggtttcgggcacaggcgggttagcgcaccggcaaacagcatggtgtagagcgacaaataggccgccagtaacactaccaggaataggttgaccatcgtcggcataccgccaaattcggcgatagtgacataaacccagtttacgccagtgccaaatagccccattccccagataaaaccgataaaggcagactgtcgagtactgcgatttaaagtcagactgagtaaaccaaacagggataccagcgaggctggccagaaatcgaagggggaaaatgccagcgtaccgctggcaccaaaaaacagcgccagtagggcgcgaacccactggcgattgaataacgaagcgttagccatcgagaatttattcttccaatttcggttgtggtgcatcatccgggattttaacgtgaacctgaataatacgtcggctatcagccatggcaactttgaataaataaccttcaatttcaatggtttcaccgcgcgcaggcagatgaccaaaggcttgcatgactaaaccaccgatcgtgtccacttcatcatcgttaaaatgggtattgaacacttcgttaaaatcttcgatttgagtcaatgccctgatggtgtaggtatgacgactgagctgacgaacgtcgcgatcttcttcgtcatcgtactcatcttcaatttcgccaacgatcagttccagaatgtcttcaatggtaaccagcccagaaacaccgccaaactcatcaatgacaatcgccatatgataacgttgggagcggaattcctttagcatccggtcgacacgcttgctctccggcacgacaactgccgtccgtaacactttgtcgatgctgaacggttcggaatctgtgcgcataaacggcagcaaatccttggccatcaggatgccttcaatgtgatctttatcttcactgatcaccgggaagcgggagtgggcggattcaataatcacatccaggcactcatccagcgtttggttacgcttgagtgtgaccatttgagagcgagggatcataatatcccgcacgcgctgctcggcaatgtccatgacgccttccagcatgtcacgggtatcgggatcgatcagatcgttctgttctgagtcacggataagctcgaccagatcgccacggtttttaggttcgccgtggaacaattggttaaggataagagtaaagaaccctttcttgggactggggctatcattgttttgtgaatggtcgtcgctcatggcgttttagttaagtttactcatgttaagtattgtcattatcagcagcgtaaatagcacgctgccaacgcattattcggggtctttttctgaaagatacgggtccggataacccagactttgcatgatttcagtttcaatcgactccatttcttcggcttcgtcatcgacgatgtggtcataccctagcagatgaagactgccgtgaacaaccatatgcgcccaatgggccaatacggctttattctgttcaacggcttcctgttcaaccacttggcggcaaatgatcaaatcgcccaacagcggcaattctatttcaggcggtgcttcgaagggaaaggatagtacgttggttgacttatctttaccacgataggtcaaattcagttcatgactttccgcatcgtcaaccactcgaatagtgacttcagactcttcctgaaactgaggcaatacggcttccagccagcgttggaagtcggcttcagttggcaaaccctgactgttttcacaggcaatctgtaaatctaatataacctggctcactgagcctcctgctctgacggggtgtggttttcacgcttgcgttgctcggcgctggcgtctttacgtttttgttctgctgcttcccaggcttcataggcgataactacccgagccaccacaggatgccgcactacgtcttcactgtggaagaagttgaagctgagttcctctacgtccgacagtacttctatggcatggcgcaaacccgatttctgatggcgaggtaaatcgatttgggtgatatcgccagtgatgaccgctttggagttaaaacctattcgggtgagaaacatcttcatctgttcgatagtggtgttctggctttcatccagaatgataaacgcatcattgagcgttcggccgcgcatataggccagcggcgcaacttcaatcacattgcgttcaatcagtttttctacgcgctcgaaacccagcatttcaaacagggcgtcgtaaagcggccgcagatagggatcgactttctggctgagatcgccgggcagaaagcccagtttttctccggcctcaaccgccggacgagtcagcagaatacggcgcacgttctgtcgttccagcgcatctaccgccgccgcaaccgccaaataggttttacccgtaccggcagggccgataccgaaagtaatatcgtggtcgagaatattggcaatgtattgcgcctgatttggtgtacgaggcttcaccatgccgcgcttggtgcggatatttaccgctttaccgtaatcggggacgctttctgccgtttgctccagcacccggctttctttcactgccaggtggatgtgttctggatcgatatcaggaacgacgccgcgaatcggtgcggtgtctacgtagaggtggcgcaggatttctgctgccgcattgacgcagatgttcttaccgaccagcttaaaacggttatcgcggcgattgatttcaatgcccaaccggcgttcaagctgtttgatgttgtcatcaaaagggccgcacaggctcagcaaacgctgattgtcggtgggctcaagcaggatttcttgtgtcgttacgtgcaaattgtttctctgagtcactgagtttctctaggtcacgtcgggccggttgatattgattcacataaggcgagtatttcttttccgttatgcctgatatcaataatacatgtcattccggaattattcatggtgagcgcagtggacgcaagcccactgcttgtctatctgtgcgatggtgcgcaaaaatcacgcgtcccacgggctgatggccttcaatgattcagtttgtgaatttttgaaagaaaatcatcaaaagtcattgggtcagactaagggtggtattgcactacgccaaggtcattttccttgcgggtacgggcaatcaccgactgcggcgattctacgctgcgtaaatccatttgatcttcggtccgtaccaccacgccgcgcagagagttggtgtagacatcaacaatgtcgacatcgacgaatttaccgatcatctccggcgagcctgcgaaattcacaatgcggttattctcagtgcggccagccagttccattacgtctttgcgtgaggtgccttccaccaatacccgctggacggtgccaatcatcgcctggctgaaattcatagcctgctgagtaatacgatcttgcaaaatatgcagccgctgctttttctcttcgtcggaaacatcatccggcaaatctgccgccggcgttccgggacgtgaagagtagataaagctgtagctcatatcaaaattcacttccgcaaccagcttcatggtttgctcaaaatcggcctgagtttcaccggggaaacccacgataaaatcggagctgatatgaatatccgggcgagccttgcgtaatttccgaatgatagatttgtattccaacgcggtatgggcgcgtttcatcatggttagaatacgatccgaaccgctttgtaccggcaaatgcaggaagctaaccaattcaggcgtatcttcatacactgcgataatatcatcggtaaattcgataggatggctggtggtgaaacgaatgcgatctataccatcaatcgcagctaccagacgtaacagttcggcaaaactacagatattgccgtcataggtagccccgcggtaggcattaacgttctgaccgagcagattgacttcccgcacgccttgagccgctaactgagcgatttcaaacagcacgtcatcacttggccggctgacctcttcccctcgggtgtaaggtactacgcagaaggtgcagtacttattgcagccttccatgatggaaacaaaggcggtaggaccttcggcgcgaggttccggtaaacggtcaaatttttctatttcagggaaactgatatcaacaatcggacttcgggttccctgaacgtggttgagcatttccggcaggcgatgcaaagtttgcggcccgaaaataacgtctacgcaaggcgcacgctggcgaatatgttcaccttcctgagaggccacacagccacccacgccaatgattaactgcggattggtttctttcaactgcttccaacgccccagcagcgcgaagactttctcctgcgccttttcgcgaatggagcaggtattgagcaacagtaaatcagcttcttcaggcacatcggttaactcataaccgtgcgtgctggccaggaggtctaccattttagacgaatcatattcgttcatttggcagccccaggttttgatatggagtttttttgtcattgggttttattttgctccgagcggtgtgaatagcgcaaagactgagttcttgtggggtattgtagtcatttggccggagtgaaaccagtgcgggaagtctgagttaacctgcagtgttaaggaaaaatccggtacactgacgtcagaaaaaatgcccaaaatggtgggcgtaacctcaattttttgaagcgtagccgaaatgaaaaaatctcaacaaagttacgatgttgtcgtggtagggggcggaatggtcggtgcagcagcggcattagggctggcgcaacgcggctggtcggtggcgctactggagcatgaagcaccgccggtatttgatagccaaagcgcgccggatctgcggatttccgccattggctgtacctcggtaggcttgctaaagcagctgggggcctggcaacgagtgcaggaaatgcgttatgccccttatcgtcgcctggaaacttgggaaatgcccggctctaaagtggtattcgatgcggcatctttgtcactgcccgaactgggttttatggtggaaaatcgggttttacagttggcgctgtggcaacagatcgatgagtgcacaaatttaacgctactgtgcccgtcacgcttacaaagcatggtaagagtggaacaacattggcagctcacgttagacacacaggagcagctacaggcgcgtttggtggtaggtgccgatggggcgaattctctggttcgccgtttagccggtattggcaccagcggctggcaatatcgtcagtcttgtatgttgattaccgtagataccggcgcgccggcgcaggatgtaacctggcagcaattttttccttccgggccgcgagcgtttttgccgttgtttgataattgggcttcgctggtgtggtacgacagtccgcaacgcatccgccagttgcaaagtctgcctctggcacagttgaatcaggaaattgcagccgcatttcctgagcgtctggggcgagtgaatgcgattgccgccggttccttcccgttaacccgtcgtcatgcgcaacgctatgtgcaatcaggattagtgttgttgggggatgcggctcataccatcaacccgctggccgggcagggggttaatttgggctatcgcgacgtggatgcattgctggatgtgatgaatgaggcgcgagagttggccgagccttgggatagcgaaaccgtattgctgcgttatcaacgtaaacggcgtaccgacaatctgatgatgcaaagcggaatggatttattctacaccgcgttcagcaatgatttaccgccggtgaaaatggtccgtaatctggcattgattgccgcccagcgagcaggaaaattaaaagaacatgcgttgaaatacgccctgggattataacaatctctttccgagcggcttatcaacaacagataggccgctgaaccctcgaatatttcccgctggtttctctaacttgttcgttctgcgaaccatccagtttggataatttatcaaaaacagaaaagcaaaaagcccgccgaagcgagcttttctaaatatggctggggtaccaggattcgaacctgggatgctggaatcagaatccagtgccttaccgcttggcgataccccaaaagatggtggctacgacgggaatcgaacctgtgaccccagcattatgagtgctgtgctctaaccagctgagctacgtagccatctttaaatcttttaaaacaagaaattgtatggctgggataccaggattcgaacctgggaatgccaggatcaaaacctggtgccttaccgcttggcgatatcccaactgatatacaattctttttaatcacaacttaagtttgacagtattccatttcagagaaatggctgggataccaggattcgaacctgggaatgccaggatcaaaacctggtgccttaccgcttggcgatatcccatctactgtgacaaccgatgaaaatggtgcgggaggcgagacttgaactcgcacaccttgcggcgctagaacctaaatctagtgcgtctaccaatttcgccactcccgcatacatgaaaaaagatggtggctacgacgggaatcgaacctgtgaccccagcattatgagtgctgtgctctaaccagctgagctacgtagccatcttttttctgcacaaccttcatcggcgttgcggggcgcattatgcgtatatggccgatttgcgtcaactagttttttccctaaaaagcgctgaaagggttcgtttgtttggcttgtgaacagtctggcgataaattaggcaattatagagattcattgttgaattttacgacaaaataaaaggttaaaagcggcaggtctattgacttgcgggggaattaagtaagcgaattttcggtgaaagaaacaggacgacccaaaggccgccctgttgaacgctattgacgaggttcgctgcgctgaatgaggcaacagaaaccgcaaactatgacttatatgcatcctgatgcacgcctacggcacggccggatgggtcatccatatttttaaaggattcatcccactcaatggcttttgctgatgaacaggccactgatggtccgcccggcacgcattccgctgcgcttggcagtgggaataactcttcaaagatcacgcgatacaaataagcttctttcgaatttggcgtgttgtaagggaaacggaaatgagcggtttccagttgttgatcggtaacttgctctgccgccattgcttttaacgagtcgatccagctatagccgactccgtcggagaattgctctttctgacgccaggccacgctgtgaggcagatccgcagagaaacattcgcgcagaatatgtttctccatttttccatttccgcacattttatcctgcggattaatacgcatcgccacgtcgaggaagtttttatccaggaagggcacgcgagcttctacgccccaggcggacatagctttgttggcgcgagcgcagtcatacatatgcagagccagcaatttacgtacggtttcttcgtgcaactctttggcatttggcgctttatggaaatagagatagccgccgaagacctcatcggaaccctcgccggatagaaccatcttaatgcccattgctttgattttacgtgacatcaaatacattggcgttgaggcgcgaatggtcgttacgtcataggtttcaatgtgataaatcacatcgcgaatcgcatccagcccttcctgcacggtgaaatgaatttcgtgatgcacggtgcctaaatggttcgctacttcctgcgcggctttcagatccggcgatcccaccagaccgacggcgaaggaatgcagctgcggccaccaggcttcgctacgctcatcgtcttctacccgacgggcggcaaatttcttggtaattgccgaaattactgaggaatccagcccaccagaaagcagaacgccgtaaggcacatctgacatcaggtgagttttcaccgcttcttccagcgcgttggccaactgatttttatcggtaacgttgtcttttacattttcgtaatcgaaccagtcacggtggtaatactcgcgaatttctccgtcctgactccataaatagctaccggcagggaattctttaatcgtgcggcataccggaaccagcgctttcatttcagaagccacgaacatattgccgtgctcatcatggcccatatacagcggaataatccccatatgatcgcggccaatcaggtacgcgtttttctcggcgtcatacaggataaaggcaaacattccttgcagatcgtcaaggaaatcagggcctttttcctgatacagcgccagaatgacttcgcagtctgaaccggtctgaaactcaaagtggtcgccatactgttgacgcaacgcctgatggttataaatctcgccgttaaccgccagcacatgagtacgcgcggtgttatacagcggctgagcacctgcgttaacgtccacaatagacaaacgctcatgggctaaaatagcgttatcaccggcataaatcccggaccaatccggcccgcggtggcgcatcaatcgcgacatttccaatgcagttttgcgtaattcgattggatcggtttttagatcgagcaccccgaaaatagaacacataattatctccctaacttctttagcctgtggcggtgatgatgttgatgttgtgtttgtcgttacgcttgggtggaacgactccatccccttaatttttcacgctgcaatatgaaatttttcaggtatgtaacgacgagtaataagaaaaatatgcaaaaaacacgccaatatagaaggttgttgttttgtgaattttggcggtgtggaaaatatgcattacaagaaaatgcgccaaaagggggagttaatgcaagaactttggtgcaacgcaccaaaaaagggaatccctggcatttttcacgccgcagcggcgttggcgctttcgcccccctaatcacttagttggctaatggattcatttcattgccgccttgttgcaacacgaaatccatgggggagtggatgaatttgaactgttgataaagctaatgattagggcgaatgtggtgatgggatcgtagtggcgtgagccaccggagcccccttgttgcggtaggcccgggtaactcgaacggttacattgttcagatcaccgtggcattgagtgctttcttcaacccgtccttgaactggagtgagcgttcaggaattgagagtgataggcgattaacggggctggtttctaggcaaaatatggcaatggactgtattgcaataacgaataaaagaagtggcggctgctttgccgccatcatctttaggaatgcttagataatatctatatcttctactgatggataaacgtagcttggacggaaaggcatagcctcaatgtcgtccagcgttgaaacaccggacaaaaccaaaatcgtttccaaaccggcctggaagccagccagaatatcggtacgcagattatcaccaataatcacggtattttccgaatgaccctgcatcttattcagcgcagcccggataatccacgggctaggcttgccgacgtaaaacggcttacggccagatattttctcaatcggcgcgcaaagagcgccgcaggccggtgcaaagccgcgcgcgtgggtatccggattggtcgcgataaaacgtgcgccgttggccacgaagaacgccgccttatgcatcatttcccagttgtaggagcgggtttcacccacaatcacaaagtcaggattgatatcggtgatggtaaatcctgctttatatagctcgtgaattaatgcgccttcgcccaccacataggcttttttaccttcctgacgtcgcagaaaatctgcagtagccattgccgaggtataaaacgcgctttccggcacttccagccctgcagccgcaaagcggttagccagatcctgagcggtttgcgaagggtagttagtgaggatcaccagcggcattccctcatgctgaattcgagccagaaaagcgtcagcaccgggaacggcggtgttgtcatgcaacaacacgccgtcgatatcacagataacgtttttaattgtcattgttttcattactcattagcacggcaaggtgccactataacatgcaggctaaaggaatgagcaggcagataaacggaaacttaatgccgttcagctgccgaaaaagtgaggaatcagttttcgagtaaacgctgtaatagaacgccgttcagcatggcgcgtttggccaaggcgaaagcgccgatagcagagccatggtctaactgggaagtcaccaccggcagatttttgcggaaatcttttagcacctgattgttgatgcagctttgaatcgccggtagcaacactttttcggcttcgattatctcgccggcaatcaccactttctgcggattaaacaggttgatcaccatagaaatggctttgccgaggtaacgacctacgtgctccagtacctcacaggccaacagatcaccgcgattgctcgccttacaaatggcgctgatattgcagtcttccagcgtaagtttgctcgcatagccttgagtcaataagtgacgcacccgattttcgatggcggcgttggacgccacggtttccagacagccaaaattaccgcagtagcagcgttcgcctaaaggatcgatttgaatatggccgatttcaccgacgtttccgttgctgccgaggaaaatctggctgttaacaataataccggcaccggttccgcgatgcagacgcaccaatacggagtcttcgcagtctttggttgcgccaaagtagtgttccgccaaggccaaactgcggatatcgtgaccgacaaaactgggcacgttgaaacgttcttgtaaattgtccaccaacggccagttatcaacactgatatgcggcatatagcgcaccacgcctgtatcaggatcgaccagacccggcagaatgaccgcaatagcaatcagttcacgcagcttgcgctgaaattgctcaataaactggctgatgatattaaacagcgcgtgttccagcgtttcttgggtacgttccggcagtgggtaatgttcttcaccgagagattttccgctcatatcatacaacgtgatagttgcgtcatggcggcctaaacggacggcaatagtatggaactggcggttttccgttacgatagaaattgcgcggcgaccgccggtggaggcttgctgatcgacttctttgatcagcccacgctccaacagctggcgagtaattttagtgacgctggcaggggcgagatggctgagatcggctatttgaatgcgcgatatcgggccttgctggtcaatgagccgataaaccacggcgccattgagttgcttcacaagatccacgttgccaatttgtgcctgtccgccggtgctcatcaataaatttactcgctttgtgtcaaacttcgttgccgttaacgatagttttggtgattttataatcgcgggtaaaggcagtcaggttggccactttgccgatttcaatgctccctaactgcttctccacgccgatagcgcgggccgcatacagtgttgccatgcgcagtgcttcatccagtggaatgcctacatgctcgacgctattttgcacagcttcaatcatcgttagcgcggagccactcagggttccgttttcatccacgcatagtccatcgcgatagtatattgttttgcccgcaaaaatgaactcttcaatgtcagcaccggctggcgctgtggcgtcggtcactagcaccaacttctcgcctttcagccgtttcgcgttgcgaatactggcccaggcaacgtgatgaccatcggcgatcacgccggtatacacttctggcgtgtcgaagatcgcacccatcagacccggttcgcggccagtgatatatggcatggcattatacaagtgggtcgcaaaactgatacccgcgccaaaaccgactcgcgcctgctgataagtggcattcgagtgaccggcagaaactataatgccagcgtctgccaactgacggatatatttggcttccaccatttctggcgccagcgtgaccttggtaatgacgtccgcattggcacacagataatcgatcattgccgcatcaggtttacgaataaatgctgggttatgcgttcccttttttaacgggcttaaataaggtccttccagatgcaggccgagagcctgattctgatgtttttccagataggcacgcatcacattgacggcgtgcttcatataatcgtcgctgcaggtaatcagcgttggcagatagctggtacagccggatttctcattggcacgctgcatgatttccagcgtctgttcggagatagcttcaagagaatcgttaaactgcacgccaccgcaaccattcaattgaacatcgataaaaccgggggctaggatggcgccacccagatcgcgctgttcgatatcggcaggcacttcagccagcggacaaatgcgttcaatcaaaccgtcagccacgactacagcgtgattatccagtatttcatggccggtataaatgcgaccgtgtgttaaagcatacatcggagccccctgagactattaaagatctttaacgttttctgcttctaattcagtgaagtattttacggtttttactttcaattccatagtagaagcttcgtcgcacaccatcacggctttggcatgcagttgcaggcagctaatggtccacatatggttgatattgccttctaccgccgcttgcaacgccagcgctttagcgtgacctgtcaccagaatcatcacttcttccgcgtccagcaaagttcccacaccgacggtcagtgcgtatttaggcacgaggcttgcatcgccaccgaagaagcgggaattcgcgatgcgagtttcctgcgtcagggttttgattcgggtgcgggaggccagtgaagaagccggttcgttaaacgcgatatgaccgtcgttacctacgccacccatgaacaggttaattttaccgtaggacttaattttctcttcgtaacgacgacattcttcatccacatcaggggcgttgccgttaagcaagttgatgttttcctgtgggatatccacatggtcaaagaaattctgatacatgaaggtgtgatagctttccggatgatcggttggcaaacctacgtattcatccatgttgaaagtcacgacatgcttgaaactaacttcaccagctttatgcattgcaatcaaatgcttgtacgcttccagcggagtgccgccggtaggcagacccagcacaaaaggacgctccgcggtcggtttgaacgcattgatgcggctaacgatatgtcgtgctgcccatttgccgacttctgcgggagttttcagtgggataagtctcatcatgcacctcatggtttagtcaaaaatgtctatactgtacgcggtttgaatcggtgatctaagggtaactcagattttgattcgcgctttggtacaatgctatgttgatttttcggatgataaaataagttttgtgtcgtggctagcagattggtgttttttgactggtttttggtgactgttatcacaaaaaaggaggttttaatttgcgatacgaaataatttttttacactccgcaatgagtaatacgtgccatgcgttttttctaaaaggtagtgaacaaaacaaataaactacttaaagggtccgatatcggacgaatagggggaaaggtgaatattcttagttacttgcaaaaagtggggcgggctttgatggtccctgtggccacactgcccgcagccgcgatactcatgggtgtgggttactggattgacccagtaggctgggggggggataacgcattagcggcgttatttatcaaatccggttctgcgatcatcgataacatgtctgtgctgttcgccattggtgtggcttacggtatgtctaaagacaaagacggtgctgctgcgctgaccggttttgtcggcttcctggttctgactactctgtgttccccggccgctgtgtcgatgattcaaaagattcctgtggatcaggttccggctgcgttcggtaaaatcaacaaccagttcgtgggtatcctggtgggtatcatctcggccgagttgtacaaccgctttagccatgtagagctgccaaaagcgctgtccttcttcagcggccgtcgtctggtgccaatcctgacttccttcctgatgattgccgttgcctttgttctgatgtatctctggccgttgatttacaacgcgttggtgactttcggtgaatacatcaaagatatgggctccgttggcgcaggtatctatgccttcttcaaccgtttactgattccggtcggtttgcatcacgccctgaactccgtgttctggtttgacgttgccggtattaacgatattcctaacttcctgggtggccaacagtctattgacgccggtaaagcggttgtaggtatcaccggtcgttatcaggcgggcttcttcccaatcatgatgttcggtttacctggcgcggcgttggcgatttatcactgcgcacgtccagaaaacaaagccaaagtggcgggtatcatgatggcgggtgcctttgccgccttcttcaccggtatcaccgaacctcttgaattctccttcatgtttgttgctccggtgctgtacttcattcacgccgtgctgaccggtatttccgtattcatcgctgccagcatgcattggatagctggcttcggtttcagcgccggtctggtggatatggtgctgtcttcacgtaacccgttggccactcattggtatatgctgattccgcagggcctggtgttcttcgccatctactatgtggtattccgtttcactatcaacaaattcaacctgctgaccccgggtcgtgaactggcgactgccggtgacgaaaccgacggctacgatgttgacgtggataatgctaatccaaataacgagagcgaaatcaacgcactggctcgccgttatgtgggtgccatcggtggttcagataacctgaccaacattgatgcctgtattactcgtctgcgtttgaacgtgaaagattctgcgttggttaacgatagtctggctaaacgcctgggcgcgtcgggtatcattcgcctgaataaacaaagcgtacaaatcatcgttggtactcgtgcagaactgatcgctggcgcaatgcgtaccgtactggccagtggccagattcctgcggccagcgcttcagctgcggcagaaattaagcctcaggcggtgatcaatacgcctaaagccccatctttggtgctggtggcaccggtaaccggtgacgtggttgcgttggagcaggttccagacgaagcctttgccagcaaagcagtcggtgatggcgtagccattcgcccaacggataaaaccgtggtttcgcctgctagcggcactattgttaagatctttaatactgaccatgctttctgtctagaaaccgacactggcgctgaaatcgttgtccacatgggcatagatacggtgaaactgaacggtcagggctttgctcgtctggtggaagagggggcagtggtagaagcgggtcaaccgattctggaactggatctggcctacctgaacgccaacgcgcgctctatgattagcccggtagttgttagtaatatcgatgattacgccggtattactctgctggctggcgacaccgtggtggcaggtcagaccaaactgtttgaaattcgcggtaaataaggcgttaacgcgctaattatctgttccgaatagcaaacatatcaacgggaagggagcgatctcttcccgtttttttatgccaaaacgccaatcccccctttttactgtaacaaacggttgtttccgggccgggcttgttggattataggcggttatgtgtttgcgctttgcattgaggaataaagcaatgagtgaggcagaagcccgcccaagtaattttatccgtcaaattatcgacgaagatttagccaccggtaagcatacatcggtacatactcgttttccgcctgagccaaatggttatctgcacattggccatgcgaagtctatttgcctgaactttggtattgcacaagattatcagggccagtgtaacctgcgctttgatgacaccaatccggtaaaagaagacgtcgaatttgttgagtcaatcaagcaagacgtggagtggctgggcttcgaatggagcggtaaaatccgctattcatccgattacttcgatcaactgcatcagtatgcgattgagctgattaacaaaggtctggcctatgttgatgagttgagcgcagagcagatgcgtgaatatcgtggcaccctgacaactccgggtaaaaacagcccgtatcgcgatcgcagcgtggaagaaaacctggcgctgtttgaaaaaatgcgtgccggtgaatttgccgaaggcgctgcctgcctgcgtgccaaaatcgatatggcttcgccatttatcgtgatgcgcgatccggtgctgtaccgcattaaatttgcggaacatcatcagtctggcaataagtggtgcatctacccgatgtatgactttacccactgcatttccgatgcgttggaagggattacccattcgctctgtactttggagttccaggataaccgccgtctgtacgattgggtgctggataacatttctatcgattgccatccacgtcagtacgagttctctcgtctgaatcttgagtacgccatcatgtctaagcgcaagctgaacctgttggtgaccgagaagctggtggaaggttgggatgacccacgtatgcctactatctccggcctgcgtcgtcgtggctatactgcagcgtctatccgcgagttctgccgtcgtatcggcgtaaccaagcaggataacaacgtcgaaatgatgtcgctggaatcctgtatccgtgatgatctgaatgaaaacgcaccgcgcgccatggccgtgctggacccaatcaaggtcattattgagaaccgcaaagcgggtgaagaatggctgacaatgccaaatcatccgaataagccggaaatgggaacccgccaagttccgttcgatagcgaaatttatatcgatcgcgctgatttccgcgaagaagccaataaacagtacaaacgtttggtattgggcaaagaagttcgcctgcgtaatgcctatgtgattaaagccgagcgcgttgaaaaagacgccgaaggtaatgtcactacggtttactgtagctatgacgcggaaaccctgaacaaagatccggccgatggccgtaaagtgaaaggcgttattcactgggtttcagttgctcatgcgttgcctgcggaaattcgtttgtacgatcgtttgtttagtgtaccaaaccccgcggcggcagaagacttcctgtcaacggtgaacccagagtctctggttatccgtcagggctttgttgagccaagcctggttgacgctaagccggaaaaaacctaccagttcgaacgcgaagggtatttctgcgctgatagccgttactctagcgccgagcatttggtatttaaccgtaccgttggcctgcgtgatacctgggctgctaaagcaactgcctgattaggctagtgattagtcatattgaaaagcgtagcttcggctgcgcttttttttgtctgttttctgtgttgtgctgaatattcgttactatgactcaaccactcaaccactcaaccactcaaccactcaaccactcaaccactcaaccactcaaccactcaaccactcaaccactcaaccactcaaccactcaaccactcaaccactcaaccactcaaccactcaaccactcaaccactcaaccactcaaccactcaaccactcaaccactcaaccactcaaccacttaaccacttaaccactcaacgacttaaccactcaacgacttagtcattcagccaaccatctgtcgctcgattattatgggccgcgttgcggtttaatttattaaacctgaacatcaggttgctccaattgataatgtcccattctttgcttttagggctgtaaagttaacgctcgagttaatactgaattttgagtggaataacggcatcaagaatattcgcattgcgaattaatggcgttgataaatgttcattagaacagatttttaatagtttgattcgtcgctgaaacctttcaatcatccctcgttgactttttatcgttgtattaattaggtttttaaccagaaattcagattttgtgaagtcagtaatattttttcatagttatgtgcacattgtcatattttggctaaataccttttttttcaattgataattcgcgtcgcgaaaaatagtctgtgtttagcaaataatgctaacgaggattatccctcactatttctttacccagatgggttttatttcagcggaacctgtgagcagtggtgaacacaaggcaacgctatttacttgtgatgtcaaagaggaattttttcatatggttacgcactgtgctaaacgtaaaacgttagcgctcgcagtcgcgggcgcggtgttagggactgggttcatgatagcgccggaggcgcaagctgaaggttttatcgatgattcatcacttactggtggtgtttactattggcagcgccaacgtgatcgtaaggacctaacgcctgacagtgcggactacggcaaatatgtcgccaacctgcatcactcgacttttaacgccaatctggatttctcttctggctacgccgctgacatgttcggtatcgacctggcggccttcggtgccgtagagatgaccaacagcggcccggcggcaccaaacgaaatcggcttcagtgatgcgaaaagccgttgggatgaaaaatggaccggtgacaccagcggtgtgagcctgtataaagccgccgcgaaattcaagtttggcgattactgggcgcagggcggttacattcaaccaaaaggtcaaagcttactggctccgcactggagctttatgccgggcacctaccgtggtgctgaaggtggcgcgaagtttgatttcgacaccgccggtgcgctctccatgtcttacatgtggaccgacgaatacaaagcgccttggtatcgcaatatgtacaacttccgtcaggctgatggcttgaccggcgtgagctacctacactccttcggtgctaaatacgacttcaaaaacaaactggttatggaagcggcgtttggtcaagcaaaagactacatggatcagtattttgctaaagcctcttatgccttcccggttgcaggtaacgatctgcgaacgtcttaccagttctacggggctaaagacaaagttgacggcggcgcaagcaaccctaacgacgtttacgacggtctggcatggttgcaggcgctgaccttcggttataccaccgggccatttgacctgcgtctggaaggtacctgggccaaggctgaaggcaatcagggctacttcctgcaacgtatgactccgggctatgccagctccaatggtcgtttggacgtgtggtgggattcccgctccgactttaacgccaacggcgaaaaagcagtatttgctggcgtaatgtatgacctggttaattggaatatggctggttggtctgtcggtacctcctatgcttacggctgggatgcaaaaccaagctctaatccagtgttcgatcagaatactcgtttaaaagagtctgcatggaacttcgacgtgctgtacaccttgcaggaaggccgagccaaagggacattattcaaactgcattacaccatgtatgacaaccacaccaatatcccgagctacggcggtggttttggcaacatcttccaggatgagaaagacattaaatttatcgtgatcgcgccgttcaccatcttctaactgtcggccccggcggagtcgtcggggcgcataacggagtctgtgtcatgaaaaaactgataggtgtggttgccgttgttctgggattgagcgcctgtgttcagcaagcgccggtacagccggaagattcgaaactgaaacaagcttacagtgcttgtatcaatgccagtgaagggtcgccagaaaggctgattccttgcaaagcggtgttaaacgtattgaagcaggaaaaagcccaccagacctttgctgagaaagaaaacgttcgcgtattggattaccaacgttgtctggatgccgaacagacgggcaacggtcaggcttatgccgctcagtgcggaaagctgtggcaggaaatacgtaacaataattaaggatggatgaggtgagtcatgaataaattcaaactaagtgctttggctgcgttaacagcaacttttggtttgatgggggcggcgcaagccagccccgccgaccaacaggttgtcgaccaactaagccagcttaaggttaatttcaaaataaaagataaccgagccgcagataatggaacggattgtgccgcgttgggagctgactgggcctcttgtaacaaaacactgattactctgaccaacgccggggatgagattcagggtaaagattgggcgctgtatttccataatgtgcgtcaggtgctggcggtgggtaacgatcagttcaaaattacccatttgaccggcgatctgcataaaatcgagccaaccgataagttcagcggttttccggccaataaagcagtggaaatcccgatcacaggtgaatactggcagctattcgaaaccgactttatgccgcgctggtacgccacttctggcgatgtgcagccaaaagttctggctagtactgacaccgaagatatcgatcaattcctgacgcgcttcactggggatcaatggaagcgtaccaaggacgataataacgttctgatgacgcctgaatcccgttttgttaagaacgaaagtctgaaaaccctgccggcagaaagcctgcgtgggcagattattccaacgccgatgagcgtcaaagttcataacgctgatgtcgatctgagcaaaggcgtggcgctggagttgagtgctttaccaaaacctgcggcagacgcagcgcagaaacgctttgaaatgctgggtgtgaatgttaatgcggcgggctacccgataacgactatgattcagccgagtgattttaaaggcgatctggccgttgctggtgcttatgaactgaagattggcgagcagggcgcgcaggtaattggtttcgatcaaaccggcgtgttttacggtttacagtcaatcctgtcgctgattccgtccgatggcagtaagaaaattgctactctggatgccaaagatgcaccgcgctttgaatatcgcgcgctgttccttgatgtcggccgtaactttaaaaccaaggatgcggtactgcgtttgttggaccaaatgtccgcttacaagctaaacaaattccacttccatcttagcgatgatgaaggctggcgcatagaaattccgggcttaccggagctgaccgaagtgggaagcaagcgttgccacgatctcagcgaaaatgcctgtttattgccacagttaggttcaggcccggatagcaataatctgggaagcgggcactttagccgtcaggattacatcgatatcctgaaatatgccaaagcgcgccagattgaagtgattcccgaaatcgatatgccggctcacgcccgtgctgcggtcgtttcgatggaagctcgctataacaatctgatgaagcagggtaaagaagcagaagccaatgaattccgcctgctggacccgacggatgattccaatacgacttcagttcagttctatgagcgtaaaagctacctgaatccctgcctggattcttccaaacgctttgtggataaagtgattggcgaaatggctcagatgcataaagaagcgggtatgccgctgcaaacctggcactttggcggagatgaggcgaaaaatatccgtttgggcgcgggtttccaggataaaaacggcaagattgagccgggcaagggcattatcgatcagagcatcgaagataaaccttgggcgaagtctcaggtttgtcaggacatggttaagcaaggaaaaattgaggacgtggaacacctcgctagccactttgcgatagaagtgagcaagttggttaatgcgcacggtattgagaaaatgcaggcctggcaggatggtttgaaaaacgccaaagatgccaaagctttcgctaccaaacgcgtaggtgtgaacttctgggataccctgtattggggcggagccgattcggtgaacgattgggcgaataaaggctatgaagtcatcgcttctaacccagactatgtttacttcgatatgccttatgaagtgaacccgcgtgagcggggctattactgggcaactcgttttaccgatgaagctaaggtattcagttttgcgccaaataacatgccgcagaacgctgaaacttccgttgaccgcgatggtaaccatttcagcgccaagagtgataagccttggccgggtgttcacggtatttcaggtcagtcgtggaatgaaactgtacgtacggacgatcaaatggaatacatgatgttcccacgagcgctgccgttggcagaacgtgcttggcatcgcgcaccttgggagcaggattataaagcgggccgcgagtacaaaggtggagaaacccatcatgtggatactcaggcgttaagtgccgattggcagcgttttgccaatattatgggtcagcgcgagttggcaaaactggataaggccggtatctcgtatcgcctgccagtgccgggagcgcgtgttcagggcggcttattggaggctaacgttagcctgccggggctgaccatagaatactccgttgacggtggtcagcaatggcagaaatacgatatcaaaaaccagccgaaggtcagtggcgaagtgatgattcgttctgccagtccggacggtaagcgcaacagtcgtgctgaagtcgttagcgcaactttgtaattatccgtctagttgtagtatcggccctgagcaattggggccaaattaacctgttgttaaactgagtgttattaagctgtgtctagttatctcctgtttaagttgagttgatggtaatttccccggtgcccccggggtttttttttgcctgttatttagtgtaattatttgcgaacgtttttagtcgctgagccttattttagataaagatgacttaggcccaaaataattgaaatttaatctgtttatttgaacgctaaataacaataggcggagaaggaaaatagatttatgaggagtaaaaaaaagaccacgcattttccaagtgtattttacgacttagagaagggtggtctgatactcggatctgatgaatcagatcttattttttgtcgtgcaaagtctcatcttcacggcaatcgccgccttcacagtgaccgtataaatacaggctgtgattcgtcagcttgataccgtgctgagttgcgatttcacgttggcggacttcaatggattcatcgctgaactcgatcactttgccacaatccaggcaaatcaggtgatcgtgatgatgctgttgggtcagttcaaagacagacttgccaccttcgaaattatggcgggtgacaataccggcgtcgtcaaactggttaagtacgcggtaaaccgtggccagaccaatctcttcacccatatcgatcagctttttataaagatcttccgcactgacgtgatggcaatctggcttttgcagcacttccaaaatcttcaggcgcggaagcgttaccttaaggccagcgttctttaatgctctgttgttgtcagtcatgcggattcagtcctgttactttgttattcaaattgaggctgttcagcctatgacatcggtaggcacaaaaatataattgcgtctcattatagaaccggtagctcaaaatgaaaaccgtaggttattaacaaagatataattgcacactttgcaagattaatcatgcagcgtattgatgaacggggagaacagatagccctagtgtacagtgatggcgacggaacttacaaatttaaaactgtttagtttcgttaacgccttattatcatctatttttgtggggtttttgccgcacatttacgcaccagaatggagaaccatgccctgatcgcaaaccaggcaattcagggcatgttaggcagattaacccacgatatctgacagactcagttcttcgctgatttgttttacccaagcttcaacgcgttcgttggtcagctctggttgacggtcttcatcgatagccaagccgataaagtgatcgtcatccgccagaccttttgacgcttcgaaatggtagcctgcggttggccaatgaccgacaatggctgcgccacgcggttcgatgatgtcacgtactgtgcccatggcatcacagaaatattccgcatagtcttcctgatcgccacagccaaacagggcaaccagcttgccattgaaatcgatctcttccagcgttgggaagaaatcatcccaatcacactgtgcttcgccgtagtaccaggttgggatcccgatcagcaaaatatcgaattgctctaaatcttctttgctgcttttggcaatgtcgtgaacctctgcaacgtctttgcccagtagcttttggatcatcttggcaatgttttcggtattgcctgtgtcgctgccaaagaaaatgcctacagttgccatatgaaatttatacctttgaattcaattagttacgttagttgtggagcctgctgctccacaatataacacatttttcatcgtgcttgtggaaagcgcctttttgctgaggctgactcatctgattttattaacaggctgattgctaagccattgtttcaaaaaagagtcatcagggactacgcaggtgactaaatccttaatagaaataaggaattaagtcctcagactgactatttccaataggccgtcatcatgccagaaaacatctctctgcttatatcaagtttatgcgatataaaattttcatctaccgctcaaccttggcagacgattgccgataaccgaattgaaacccgcgggtttcgattgcggtgccaaggagggccttgtcaaatcgatttttgatgaggaaggagaagtcgttggctgtatggaacgtcctaaatcgcttttcggtcatcaaactccaccagaattttgtggcaacaatccgacaataaatagaaaaggaacgaacatgcagtttttgaaaaatatcaccatcagggcagcgttactttgggttctcggggcatttagcttgctctggggcggagtttcagcttacacattattatcactcaatgagttaactcaagcctcaaacgcgaatagcgttttggtcgataacatcagcttggtcaatcagggaaccgatcagtatttccgtatggtgacccgattgagtcgttcagtggattatcgtctggcagggaatagcgcagatgccgatcgtgagctgaaatcctccaatctggccttggatagcctgaaaaagaacttggcacagtttaaatctatcgatcatgcgcagctcagcccggtattggttgaggatgttatttctaactggaatgccctgattgcccaaggggtggaaccactgtatcaagcggctatggccggtgataatactgcttaccagctgttgtccaagcaaacggtaccagccttaagccgtcagtatggcgcgtcatccgaggcattcagtaaaactgcatcggcagaaatcggcgtggtgaaggagcaatttgctcatcttaccaaggtaagcagcgttacgctggtttcggcgctggtgattggtctgttgatattactggcgacggatcgctttttggtggcaaatctggtgcgtccgctcaatatgatgcgcgaccatttcaaagtgattgcctccggtcagctgggacaacccattgtcgattttgggcgcaactgtgtcggccagttattcccactattgcgggatgtgcagaccagtttggccaacaccgttagcgcaatccgcgacagcaccgacagtatttatcatggtgcatctgagatttctgcgggtaataccgatttgtcttcccgtaccgaacagcaggccgcggcattagaagaaaccgcagccagcatggagcagctcacggcgacggtgaaacacaacgcagataatgctcatcacgccagccaattggcggcgacggcatcatctacggcgaaaaagggtggctctctggtttctgacgtagtgcatactatggccgatatctctgccagttcgaagaaaatcgccgaaattaccacagtgattaacagtattgcttttcaaaccaatattctggctctgaatgcggcggttgaagcggccagagccggtgagcaagggcgcggctttgccgtggttgccagcgaagtgcgcaatttggcacagcgcagtgctcaggcggcgaaggaaatcgaagggttaatcaccgaatcggtcaatcgtgtcaccagcggctctgcgcaggttgaaagcgctggcaataccatggacgaaattgtgcgctctattactaacgttacggatctgatgggcgaaatcgcgtcggcttctgatgagcaaagtaaaggaatcagtcaggtcggtcaggccgtggccgaaatggatagcgtgacacaacaaaacgccgcgttggtgcaggaagcatcacgggctgccgcttcactggaagatcaggctgctaagttgaatcaagcggtggcggtatttaaattgaaggatgacaaggtaacaccggcggctaaaaccagggtaaacccggtgaaagcgccgacgacccagcgcgtggacaataacgcgaattgggaaaccttttaactaaccagtgccataacattgaaagagtaaatatggagtggcgtaatgaaacacgccactccagcgtagtcaccgacggcattatagccctgcctgatccttagccaactgggcaagcagcatttgctcaatcagttcgctacggctgatgttacgttgctctgcaaggctattgagagcatcgaccgcatctgcattaatcttcagttccacgcgccgtaagccacgtactttatcgcgccgtagttgatttcgcttattaattctaagctgttcatcacgggataatgggtttgttttcgggcgccccggacggcgttcatctgcgaacagatccagcgtcgtgcgatccgtttgttcttttgccataggtagcggtactacaagggattcacatcagaaagcgttttagcttttccagatgatttggttaacacgtttcagaccaaaataaccgggctgaatttgcatttgtcccccggcacggcctgagtattacggctgaacgcggcggcaaaattatagcgcgccataataccctagccaatgaagtgccgacaatgactaactgcaattagatcaggctaattcgttattttttgcacaatttttccacaggaaatacatttcttttccccagggtacaaattttaaacaacagtattagcctcgcactttattccgcgtcgagaaaacggtggatagcacgtaataccgcctggggtttttccgcatggacccaatgcccgcagccggaaataacatgagcgcgagcctgcgggaactgacgggcaatttcatctcggtaactgtcctgaatataaggcgacaattcgccacgaataaacagaataggatgcgaccaaggcggaacaggctgccagccgacaatattttcatattgattccacagcgcctgtacgtcaaaacgccattctccagcctgaaatgatttcagcaggaattgaatcacaccttcttcttttatgatttcccgcatgatttttgccgcatcctgacgttgggtcacgccggcttcggtcacggcgttgagcgcagcgaaaatctgatcgtggcgtcgggtttgataatcgatcggtgcaatatcaatggcgaccagtttatcaatgcgatccggcgcaagagccgttagcgccattgccacttttccgcccatggaatggccgataataatggctttttctatggttaaatgatcgagtaattccagaacgtcctgcgccatcgccgggtagttcatttgcggggaacgaggagataaaccgtgatcccgcagatcgatttgcactacggtatgggtctgttgcaggtcgcgagccagcacgccgaggttatcaaggttgccaaacaagccgtggatcagcaggatagggagattattagtcggagaatgtgcgctttgtaagcgaaagttcaatttcatggcgaagttcatacagagagatattgtggttagggtatcatgactggatgatggtgtgctgctccggaatgacgcggattatcagaacaaagttgaataacgatctattcaggcttttcatcgccagatccgttatggcgctattcgccagccagctttgactttataatccttggatatgaataaagaaagtagaaaaacagtactggataaagatgaaaactattgaagtcgacgaagagctttatcgttatattgccagccatacgcagcatatcggcgagagtgcgtccgatattttacggcgcatgttgaaatttaccgctgggcaaccggtacgtactgttcctgcgggcgaagtcgccaagacgccggtggcggtagtgcctggtccgcgagatcgcgtgcgcgcgctgcgagaactgctgctttccgatgaatatgccgagcaaaacaaagcggttaaccgttttatgctggtgttatctacactttataccttggatgcagcggaatttgcggcggcaacggagtcactgcacggccggacccgcacctattttgccggtgatcaacaaacgctgctgcaaaatggcactcataccaagccaaaacacgttcctggaacgccatattgggtgattaccaataccaataccgagcgtaagcgcagcatggttcagcatattatgctggcgatgcagttcccgccggatttgaccgaaaaagtgtgtgggactatctaattcacatctattgcctctttccgttggctacaggctgcgcggaaggagttttttagctaattaggagtagtgacagtggcttatcatcctcgtgccgggcaacctacccgccaaagcgatttgattaacgttgctcaactgacgtcgcaatattatgtgctgcgcccagatgctgaaaatccggctcacggggtaaaatttggtacctctgggcaccgtggcagttctttgcgtcacagtttcaacgaagaccatattctggctattgctcaggcgattgccgaagtgcgccatcaacacggcattaccggcccgtgctacgtaggtaaagatacccacgcactgtcagaaccggcaattatttcggtgttggaagtgctaaccgccaacggcgttgacgtggtggttcagacagacaatggctttacgccgactccggctatttcccacgccattttgacctataaccgtcagaataaaacgctggcagacggcattgtcattacgccttctcataatccgccggaagacggtggtattaaatacaatccgcctaacggtgggcctgcggataccaatctgacttcggtgattgaaaagcgtgccaaccagttactggccgaaaagctggctggagtgaagcgtcaatcgttggataaagcctggcgtggcaatcgtctgcgtcagcaggatttgattcagccttacgtcgaaggtttggttgacgtggttgatatgccagctattcagcgtgccggtttgaaactgggcgtcgatccgctaggcggttcaggtattgcttactggcagcgaattggcgagcactacaagctggatttaacgctggttaatgattctatcgatcagactttccgctttatgcatttggatcacgatggcgtaattcgcatggattgttcgtcagagtgcgctatggcaggcttgctggcgctgcgcgacaagttcgatttagcctttgccaacgacccggattacgaccgtcacgggattgtcactccgtcaggtttgatgaatccgaaccattatctggcggtggccattaactacctgttccagcatcgtccgcgctggggggcagaggtcgcggtaggtaaaacgctggtttccagcgcgatgattgaccgcgtagtggctgatttaggccgcaaactggtggaagtgccggtgggctttaaatggttcgtcgaaggtttgcataacggtagctttggtttcggtggcgaagaaagcgccggtgcctctttcctgcgtttcgatggcacgccgtggtctacggacaaagacggtattatcatgtgtctgcttgctgctgaaattaccgccgtgaccggtgagaacccgcagcaccattataacgatctggctaaacgtttcggcgcgccaagttacaatcgcattcaggcaccggcgactcaggcagaaaaaaatgctttatccaaactgtcgccggaaatggtcacggccagcacgctggcgggtgatccaatcaccgcacgtctgaccgcagcgccgggcaatggggcgtctatcggtggcctgaaagtgatgaccgacaacggctggtttgccgctcgtccatctggcaccgaagaagcttacaaaatctattgtgaaagtttcctgggcgcagagcatcgcgaaaaaattgagaaagaagccgttgatattgtgagtgaagtattggctggcgcgaagaaatagcttttaagtttctcgcaaactcatgaaataacatggcagctccgcaagggactgcctttttttcgcgattagcccaaggcaaccagcagcgcgcctatgctaatcagggcaacgccaataccggcgataaacgaaatcttctcgccaaataaaatcacagccaaaatcaccgcaaacactacgctgagtttatcaatgggcgcaacctgcgaaacggtgccgtttttgatagccataaagtaaaacaaccaggacagcgccccggccacgccgcttagtacgataaacagcaaggcttttttatcggtgagtacggtacccaccagatgatatttcccctgaaccaccactacgccgactaaaaacagcgccatcaccacggccctcacggcggtggcggtattggcatccagatgttgaagaccgattttgccaaatatggcgaccagcgaagcggtaaaggcagagagtaaagcgtagattaaccaggtactcatagcgaataagacctatttgcaacgaaaactccgatgctacgcctgcaaactttccttgcctacccttaaaggtaaatcttagcgcggtaatgtatcagcaataaaacgatagccgacgccagtttcggtaatcagatgtttagggcgtgcgggatcggcctccagcttttgccgtaggtgacccatataaattcgcagatagtgattgtgctcgacgtagtttggtccccacacctgattcagcagttggcgctgggtgatgacttttccagggttggccagcagggcggttagcaggcgaaattccaacggcgttaggtggaggtcttcatcgccgcgtttgacctgacggttgatcagatcaacgctcacatcggcaaaactgacgatggggctttcctgcgctccagatccgtgacgacgtagtgccactcggactctggccagtaattcgctgataccaaaaggtttgctcagataatcgtctgcgccggcatccagcgcggccactttgtcttcttcgctattccgggcggagagcacaatcactgggatagcgctccattggcgcaaatcctgaatataatccagaccgtcgccgtccggtaacccgagatcgaggatgattaaatccggtttgcgggtgccagcctcgatcaaacctcgctgtagggtgtcgctgtcaaatacccggcagccttcgttctccaacgcggtacggacaaagcggcggatctctttttcatcttcaacaattaaaacggtagctggagagataatcacatgtcctcaggattaacgttatccatatctggtggaacctccaatggcaggacaaaatggaaaacagcaccgccgttttggcctttctctgcccagattctcccaccgtgaacatcaataatggcacggcaaatggctaaccccaagcccacgccgggaatggccgactctttattgccacgggagaatttatcaaaaataagctgctcttgcccaccggtaataccaggcccgttatcccagacttccacattcagccattcttcctgaactttggcgcgaatgcctagggttgcgctcggtccggcatatttatgagcattttccaataggttgataaagacccgctccagcagactgccatcacaattaatcagtaccatttcactgggtaaatccagctcgataagatgagaactgagcgttgtttccagcatgtgcagcgcgctgccgacgatttcttccaacgattgccattctttccgcaggttaaaaccgccggattgaatccgcgccatatccagcaaattattaaccaatcgagtggtgctaagcacctgttgacgaatctggctggcctgcggcgcgtggcgggaaccttcagccgctaagtccaaggtcaggatttcggcctgcccgaataatacggttaacggagtgcgtaaatcgtgggaaagcgccgccagcagggaatttcgcagttgttcgcgctctgcgtccagtttggcgacttcggcggtacgggccagatgcagacgctccagcgcgttggctatcaggctggtaaaggtttgtagcaaacgctgctgctctggcaccatcaattgccgtaggttggccggttcaatcgccagcacgccgaaggtttgttttgaggtggtcagtggcaacagttgataaggtacgccgggcagggtatcggtacctgcgcctgcgggagcaccgtgatcgaaactccagcgggcaatggcttcatccaccgaaaaaatattgccgtcttcggtgccaatttggtgtaatcgcccgtcttcctgcggcagcaacaggccagttttggcctgaaaactgctggaaagaaagtggcggctggttttggcaatgtcaacgcagcttaatgcgcggctcaggccgcgggacatctcatacaaatgtctggctcgttgctcgcgataacgggcgatgcgcgcctgatagcgtacgccggcggttagattccccacgacgatgccgacaatcaacatcacgccaaaagtgaccagatattgcacatcagtcaccgccagcgaccagtggggttggacaaagaacagatcgaaactggcgacgtttagtacggcagccagcacagacggccagcgcccgtaaaacagcgcaatgatcaccacgccgagcagataaaccatcaccagattcgcctgatcaaatccggggatcagccactgagataaaatagtgatcagtgcacacagcccgatcgcggccgcgcagccttgtagctgcatgcgccatttttcgctaaaactgcgtgtatcattttctttggccgccgcaggttgatggtcattttccaatgcgacaatcaccaaatccagatccggccccagcttgcccagtcgatcgccaaaactgccgcgcagtttccagcgttgctcgctgcggcgaccaataatgattttccccagattgtgatcgcgagcgtaacgtagaatcgcccgttcttcacaaggatcggaaagggtagcggtttccgcgcctaattcttgcgccagcttcaaggcgcgtaggatggctcggcgtttcgcttccggcaatgcgtggagacgtggcgtctctacgtagaccgcgtgccagatacagccgagacgagccgccaaacgcgctgcggtgcgcaccagcttctcattaccgacattgtggccgatacacagcaaaatcgcatcgcgggtgtgccaaacgcgctcgcggccttgggtatcccgaaaggcgcgcatttggtcgtccacccgatcggcggtacgacgtagcgccagctcgcgcagagcgatcagattacctttgcggaaaaaatgttcgatggcacgttcggcctgaccggaaatatacactttgccttcgttcaggcggcggcgtaggtcatccggtggcagatccaccagtacgacttccgtggcttcatcgaacatatgatcgggaatcgtttcccgcacgcgaataccggtcacgccgcctacgacgtcattcaggctttccagatgctgtacattgacggtagtcagcacatcaatgcctgaatccagcaattcttccacatcctgccagcgtttgggatggcgcgaaccgttggcgttactgtgcgccagttcatccatcagaatcagcgccggatgacgcgccagcgccgcatccagatcaaattcgcgtacctggcgattgcgatgagcaatacgcttgagcggtagctgatctaacccttccagcagcgcggcggtttcactgcgaccatgggtttctaccacgccaaccagcacatccagcccttgagcacgcaggcgctgcgcctcttgcagcatggcgtaggttttccctactccggcgcaggcaccaaagaagaccttgagcttgccgcgtggtttttcgttcgccactgccagcagactatcgggatctggacggattggttcggcatccacggtgatttttccttattgttttagcggtttaacgttatccagtgccatattcagtatcagcacgttcaccacgctttctccgaggaagttcggaaccgatttctgctcattttttgcgatgagatcctgcacttcggataatgttaactggcgggctttagccacgcgattagcctgataataggcggcttccagcgatatttgcggatcgagaccgctaccggaggcggtaaccaaatccaccggaaccgggccggtttgatctgggttagccaaacgcagtgctttaatccgttcgttaatctcggcatccagtgctgggttgctaatagctaaattactgccgccggatgacagagcattataaggtatatccgatgtggccgatgggcgaccactaaaatatcccggttgagtaaactgctgaccaatcagtgtcgaaccgaccgcttcgccgcccagcgttgccagagaaccatgggctttatcgctaaaaataacctgagccaaaccggtagtcagtaatggataggcgataccggtgatcagggttaataaaatcactaaaatcagtgacggacgcagataagacatcataaaaacctcgttattcacgcaggccggacgcagtgtccggcagccattaagcgctcgttcaacccatattcagcgcggttaacaccaaatcgatcagtttgatcccgacaaaaggcactaataaaccgcctaagccgtagatccataaatttcgacgcaacaaagccgcagcgctcatcgctttataactgacgccttttaacgccagtggaatcagaaacacaatcactaaggcgttgaaaattaccgccgatagaatggcggaagacggggagtgcaattgcatcacgtttaacgcattcaactgcgggtaagtggcagcgaaagcggccggaataatggcaaaatatttcgctacatcgttggcaatactaaaggtcgtcagggaaccgcgagtcatcagcatttgtttaccgatgtgtacaacctcaatcagtttggtcggattggagtctaaatccaccatattgcccgcttctttcgctgcctgcgtccctgagttcatcgccaccgcgacatcggcctgtgccagcgccggcgcgtcattggtaccgtcgccggtcatcgcgaccagacgaccttctccctgatattgacgaatcagcgccagcttggcttccggcgtggcttcggccagaaaatcatctaccccggcttcggcggcaatggctgcggcggtcagacggttatcgccggtaatcatcacggttttgatgcccattttgcgtaattcggcaaaacgctctttaatcccgcctttgacgatatctttcaacgcgacgacacccaaaacccgagcgccctctgcgacgaccaacggcgtgccgccggttttcgctacgctttcaaccaaatcgtccacggcgcgtgggaaatggccattattcgactccacgtggcgacgaatggcatctaccgcgcctttgcgaatcattctatcctgcacgtttacgccgctcatgcgggtttgggcagagaaggggacaaaggttgcattcaaggcatgaatatcacgctcccgcaaattaaagcgctgtttcgccagcacgacgatactgcggccttctggcgtttcatcggctaaagaagatagctgggcggcgtctgccaattgctgttcggtaacgccgggtgcaggcaggaattccgaagcctgacggttgcccaatgtgatggtgccggttttatccagcaacagcacatcgacatcgccagcggcttccaccgcgcgcccgctggtggctatcacgttggcacccagcatccggctcatgccggctaccccaatggctgataacaggccgccgatggtggttggaatcaaacacaccagcaacgctaccagaacggtaatggttaccggactgccagcctgattagcttccacactaaataatgagaagggaaacagcgtagccgttgccagcaaaaacacgatggttaaggccaccagtaaaatggtcaaagccacttcatttggtgttttacgccgttttgctccttccaccatcgctatcatgcgatcgaggaaagtctcgccgggattgacgctgcactcgactaccaaccaatcggacagcacgcgagtcccgccggtaacggaggagaaatcgccgccggattcgcgaataaccggagcagattcgccggtaatggcgctttcatccaccgatgcgccaccttccagcacttcgccatcgcaggggacggtatctccggcttgtactagcaccaaatcgccttttcgcaggctatcggcggatactttctcctgcggcgcatccgcgtgaggagcgctaagttttttagcccaactggttttttttacccctctcaggctttcggcctgagccttactgcggccttctgccagcgcttcggcaaagttggcaaacagcacggtaaaccaaagccaaagggctacgttaccggtaaacatggcgttgccgtcggcttgcccgctgagaatcgccagccagatagcggttgtcaaccaactgcctaggtacaccacgaacattaccgggttacgccattgggtacgcgggtccaattttttcactgcatcaatcagtgcggtgcgaaccagtgcgggctcaaagagtgcgcgttgtttgcgagtcatatgtgttctctctctacaaccgaatcgttgttaacattatttattaataatcagcgtgttaaccaaactttcagatgttcagcgaccggccctaatgccagtgcaggaataaaggtcagagcgccaaccaacatcacggtaccgaccaacagaccaacaaacagcggacctgaagttggtaacgtgccgttccccgccggttgacgttttttcgccgccagcgatcccgcgatagccagaaccggtaaaatgacgccaaagcggccgatgaacatcgccagcgccaataacaggttatagaacggggtattgacgctcaggccagcgaaggcgctgccattgttgttagccgccgatgacagggcgtacagcacttcactgaaaccatgagcgcccggattaagaattcctgctcgcccggcgtcggtgttcagtgccagcgcggtgcctagcagtaccacggtcggcgtgaccagaatggccagtgcggtcattttcatatcgaacacatcgatttttttacccagatattccggcgtgcggccaatcatcagcccggcgataaacaccgtcagcagcacaaacagcagcatcccgtataagccagagccaacgccgccgaacaccacttcgccaatttgcatcagccacatcggcaccatgccgcccagcgcggtaaaggagtcatgcatagcgttaaccgccccacacgacgcggctgtggttactacggcgtacatactggacgacagaatcccgaagcggctttctttaccttccatattgatattgctgtcagcgccgagcagggtaaggtgcgggttgcctgtcagttcggcgtacatcactacagcgacagcagtgatgaaaatcagtgacatagcccaaatcagcgcatgaccctggcggttatctcccactacctgaccaaaagcaaaacacagggcacagggaataaggaaaattgccagcatttgcacaaaattgctgaaagcggttgggttttcaaacggatgagcggagttggcgccaaagaaaccgccgccgttggtgccgagcattttaatcgcttcctgtgaagccactggccccatcggtaggatctgttttgctccctctagcgttgtaacgtgttggtaagcatcaaaattctgtaaaacgccttggctgacaaaaatcagcgcgataatcagagaaaggggcaatagcacgtatagagtaatgcgcagaatatcaacccaggcattacctagtgtgttggaagaatggcgggcgaaggcgcgaatcaacgcaaaagccacggtgatacccgttgcggcagacaggaagttttgcaccgtcaaaccggccatttggctgagataactgagcgtattctctccgctgtaggcctgccagttggtattcgtgacaaaactgacggtggtatttaacgctaactgccaggacatccccggtaaatgttgaggatttagaggcagagcgccctgagacattaataatgtgaataaaaatattccaccaatcagattaaagaataaaatagccagcgcgtattgccaggcattcatttcttcattttttacgccgctacagcgccagatagcggcttccatacgctgtaatcgcgggaatggttcgccttcgattagccgcgccaaaaaaccacccagcgggcgtgaaagaaccagtagcaccaataagaaactggcgataagcaggaaagctgacgcagccatttaaaagtcctccgcattaaataaggcgtataccaaatagcccagaagcaacaggaccagcaacgcaccaacaacgatgctgaaactcacgggacacctccacaggtgatgttttttgataacagcaggttacggagtcataaatatagttactgataaaaaatccgcattgtgtgtaaaaaaaacgtaaaaatggtcaaaaaaggttcataaagtgacgttaatttaggcggtgagtttgtggtagagatactttgagttcgaagaaaacaggaatgctaatttcatgctcataacgttatcaatctcgcaactaaaatagccacaagataactaaaggttagttttaaattaaccttaatgtaacaaaattacggaagatgacgataatttgtgtttttcgtgccttttagtggtcggatgagtggtaaactttcattcaatgcggtaaaattttgttcagtttccaaattcacttgtttatttctagcgccaagctgtaaaactgacccagagttgatagtggtctgcctaacagaacggcgcttttaaggaggatcgctatgtctatgtacaatgtatatccattgcatcaggttctcctgcgccgctgcgcagtaatcctgatgggtgttttggctttgccagtgatgttattccgccgtgaccgtgctcgtttttacagctatttgcaccgcgtttgggcgaaaaccagcgataaaccagtatggttagcgcagtctgaattagccgctcgggatttctactgagttaattagaatcccggtgtgaaatcgaatgccagtcagtgcacgctgactggcatttgtttttttggcttcccaataatacggttcacgagtgcccggcggcgctggctttactcacacactctcccctcatcaagccgatatttacctcgccttagggttatttcacgcaataacagttatgcttaaaattcataagattaaaaattctgatgccaatgtgtatcatcgggccagatagcgtgatttaaccaaacgtttcttgaatttattgaatgtcgggagtgaactatgagcgaaaaaatccccgtaggtatcagcgcctgcctgctcggcagcaaggtacgttttgacggtgggcataaacggctggacttcgctacagaagaactggctccctacgtcgaatttgaacccatttgcccagaaatggccattggtttgccttctccgcgtcccgctctacgcttggttcgcaagcaggatgacgtcctgatccgtaccagcaatgacgccaatcaggatgttaccgccgccatgcgtcgttttgccgaggaaaaggtatctcatctcagccatttgtgcggctatattttgtgcgcaaaatctcccagctgcggaatggagcgggtgagggtatacagcgagaaaggcgatttttccaagaaggagggtaccggaattttcgctcaggaattgctaaaacagttgccctggctaccggttgaggaagatggtcgcctgcacgatccgcaactgcgagagaattttgtcgagcgtatctacgcgctggctgagtttaattctctatggaagaaagggttaacgcgcggcagcctaatggcatttcatagtcgttataaactttcactgctcgcgcattctcagcctgaatatcgccagatcggtccttttgtcgccgcaatggatcaatgggaatcactggaagattttgctattgaatatcgtaaccgtttgatgcatttgctggcacataaagcgacccgccgtaatcacactaatgtcttaatgcatgtacaaggttacttccgtcgacatttaaatgctgctcaacggcaagagttggcccagttaatcgaccgctaccgacagggtatgcaacccttattagcgccaataactctgttaaaacattatatggctgagtacccggatgcctatctggcgcaacagcggtattttgaaccgtatccggaggcgttgaggttgcgctacggacattaagcggttggtgatcggctgctgtgtctgtctatttgatttttagataattttataaaaaggaatgccatgactacccatttggtctggtttcgccacgatttgcgcgttaccgataatttggccctgcacgcggcctgtgaagacccgcaggcgcaggtgcaggccgtatttatcgctacgccggggcagtgggcatctcacgatatggcgccgcggcaggccgcatttattcatcaaaacctacaattacttcgacagcaactcgcgctgcgtggtatcccattgcattaccatcaatgccatgatttcgacgcttcagtagactggttagccaatctttgtattgaacaacgcattgataaactgctttataatcatcaatatgaactgaacgaacgactgcgggatacgcagctggaagaaaagcttcgtgggcaagtcatctgtcagggtttccatgacagcctgttattgccgccgggaagcgttctgaccggcaacggcgaaatgtataaggtttacaccccatttcgccgtgcttttatccagcgcttgttgatgactgactgcaactgcgtgccagccccacaaccgcggcagtcgccaatggatgactcatctgcgctcgcaccttttaattatcctgcagcagaagtggacgctgagctctttcccgcgggagaagaggccgctttacgccgccttcgccaattttgtcgcgaaactgtgcaggattatcagaaacagcgagatttgccggcagttgacggaaccagccaattatcgccttatctggctcttggcgtgctgtctccgcgccaatgtttcaatcgactgcgagcagaatgccccaacgtgctggacatgccggacggtggcgcattcaattggcttaatgaattgatctggcgagaattttatcgccatctattggtggcttatccgcgattatgccgaaatcgtccgtttattgactggacggatgaggtacgatggaaccctgctgacgataagttgcaagcgtggcaacaaggcctgaccggctatccgattgtggatgcggcgatgcgacagctaaatgctaccgggtggatgcataatcgcttgcgtatgattaccgccagctttttggtcaaagacctgctgctggattggcgtttaggcgagcggtattttatgtctcagttgttggatggcgatctggctgccaataacgggggctggcaatgggccgcgtcaacggggacagattctgccccgtattttcgtattttcaaccccacgactcaaggggaacggtttgataaacaaggcacttttatccgccgttggctaccggagttagcggcggtgccggaaagtgatattcaccagccttggcgttgggcgcagtggcaacagccgcttgattacccgcagccgatcgtcgatcacaaacaagccagattggacacgttggccgcatttgaggccgccagacgggaacattcccgcacaacataacaacaaggagccagtatgtttaaaaaagggttagtcctgatcttcagcctctattcttcattgagctggggtggatttgaggtggttgcccttggcgtggatggtggcgtcagcgatggcaatttaacctcgtatttaattcgcagcgatactaaccctctgtatcttggtctggacgcaggatctgtgcttcccggtatagccaaaggcttggacaaagggaactttgccgatgtaaccgagcaaaacgcggcgcctttcacccgtcagggctatattttccgtcaacgcattaacagctactttattagtcacgctcatctggatcacgttgcagggctgattattggctctcccgaagacagtaagaaaaccatctatggcaccgccgctacggtggaaaccttgagaaaccactattttaactggcgcgtgtggccgaactttaccgattctggcagtggcacgcgcttgggcacttatcgcctgcaggctccgcgtcccgctcaacgtttcactataggtttaacccgattgatcggtgaaatctatcctctgagccatgaccagtctccttcttcgatgttattgatcggtcagggcgatgagttcttcgcctattttggtgataccgggcctgacgcggtggaaaaatcaaaaaatctggatcagatttggcgcattttgggtgaaaaggtcaaacagaagcagctaaaaggcatgattatcgaggtgtcttacccaaacagcgtggctgacggcaaactttatggtcatatgacacccaaatggttgctggcagagctgaaaaatctggcgaaatacagcggtgaaggcgagcaaccgctgaaagatttaccggtggtgattagccatatcaagccgtcgttacagcaggggccagatccccggaaagtcattgtggatgaactgcagcaggctaacgatctgggcgttaaatttattctgatggagcagggcgacagtcagcaattctgagtgtcgcgggtttgctttcgctaaaatcggcgggtatgttagccccaaaatcgctaaaacgagatgaagatcatgcgtaacaccgaactggaaaccctgataaataccgaattgaataccgctgcttttcaggattatgcgccgaatggcctacaggtcgaaggtcgccctgaggtgcaacgaattgttaccggcgtgacggccagtcaggcgttgctggatgcggcagtggagcatcgggccgacgcgattctggttcaccacggttatttttggaagaatgaaccggtggtagttcgcggtatgaaacgtaatcgcctgaaaaccttacttactgaagatatcaatctctatggataccatctgccgctggatgcgcatccaacgttgggcaataacgcgcagctagccaggctacttgatattcatgttatcggtgaaatcgagtcgttgttgccttatggcgagtttgaaaaaccgatcaataaccagatactgaaagagcgtctggaaaaacagctaggccgcccggttctgcactgtggcgatcacgcgcctacggatattcgtcgcattgcctggtgcacgggcggtgggcaaggttatattcagcaggcggctgatttcggggttgatgcctttgttaccggtgaggtttccgagcagacgattcatattgctcgtgagatgggggtgaatttttatgcggcgggtcaccacgcgaccgaacgcggcggcattaaggcgctgggggagtggctggcgaaccaacacgggtttgacgtgactttcattgatattcctaaccctgcttaatgctctctcaatcacgccgctcaatcaattggtggcgtgaattctctgctctaatcctgaccagaaaagcactattcctcgtaaaaactgagggttattagtttactcatcctaataaaaccctatctgacgaatattaagcgataaaggttatatttatcataacttttaggtattcaatgctgatttttaataagaaataaattagttaattgccaacatagtggtttaaaacacgttaaatattgctttcatagcgattaataatggtgttatccgcttatgtggcagttaatcgcctatctcccgttgttaagcccctattgacagttgcaatgcgctaaagcataactatgtgcttatggctaataattattaagttatagaaacagtcaaagtcttataaagagcagggagataaggattgcaacgagcacgatgttacctattgggagaaagcgcggtggttctggaattggagccgccggtgactctggcaagccaacaacgtatttggggtctggcggatcgcctgattcatcatcctgatgttcgcgaagccattccgggcatgaataacctgacgctgttgctggagaacccgcagcaaacggcgttggatgccattgagcgtttacagcgctggtgggaagaaagtgagtccttggtactcgaatcccgaaacattgatattccggtgatctacggcggagagttcgggccggatctggaagacgtggctcgtcacaccggtttgtcaccgcgtcaggtggtggaatgtcattcttctgcgagttatatcgtctatttcctcggttttcagccgggtttctcctatttaggcggtctgccggaacaactggcaacgccgcgtcgcggggagcctcgtctgtctgttgcaccgggttccgttgggatcggcggcagccaaacgggtatttatccgttagctacccccggtggttggcaattgatagggcgtacttctctggcattgtttaacccgttggaaatgccgcctaccttgcttcgccccggtgataatgtgcgctttgtaccactcaaggagggcgtatgttaaaaattattcgcgccggtatttacaccactattcaggatgaaggccgtcccggttttcgccgtttgggtatcagtcagggcggggcactggatttacccgcgctgaaaatggctaatatgttggtggggaatgcccccgctgccgcaggattggaaattacgctggggcagttttgtgccgaatttactcagacaggctggatcgcactaactggcgcgggctgtgatgccaggctcgacgaccaattactgtggaccggctggcgttatccggtgaaagcgggccagcgtattcaacttaatgtcccattgcggggaatgcgcagttatctggcgatctccggcggtattgacgtgcctgaaatgcttggctcgcgcagcactgatctgaaagccggatttggcggtcatcaagggcggttgattaaagagggcgacgaattgccgttgggcaaagcgagccgtttacctaaggaatccgttggcattaaacaattactgtttggtaatcgagtgcgggcggtgccggggccggaatatcacgagttttcgtccagtgcgcaagaggcgttttggcgcagtgcgtggcagctgagcccgcaaagtaatcggatgggctaccgtctgaccggcggcgagttatcccgcaataccgcgcgggaaatgttatcccacggtttactgcccggagtggtgcaggtgccgcataacggccagccaattgtattaatggcagatgcgcaaactacgggcggttatccgcgaattgcctgcgtgatcgaagccgatctcttccatttggcgcaaattcgtttgggagaaccggtgcattttgtcaaatgtacgctggaggacgctttgaaagccaaagccgaacaacagctgtatttgcaacagattgaacggggtttagccgcgggtttccacccggtggaggccaaatgaaagtagatttaaacgcagatttgggtgaaggctgcgccaacgatcgtgaattattgcagttagtcagttccgctaatatcgcctgcggtttccatgcgggagacgctgaaattatgcgccagtcggttcgttgggcgttggagtttcgcgtggctattggcgctcatcccagctttcccgatcgggagaactttggccgcaccgcgatgcaactgccgccagaaaccgtctatgcgcaggtgatttatcagctcggcgcgttggcggctatcgtgagggcggagggcgggcgtatgcagcacgtaaagccccacggcatgctgtataaccaggcggcgaaagatccgcagttggcagacgccattgctcaggcggtgaaagccgtcgattccaatttgcgtttggttggattggcgggtagcgaattaattcttgctgggcagcgcgcgggtttatctacccgacaggaagtttttgccgatcgtcgttatcaggccgatggttcgctggttccgcgcaacgagccggatgcgttgattgaaagcgatgaactggcattatctcaaacgctggaaatggtacagcagcggcgggttcagtcccgtgacggcatttgggtgccggtacaggcagataccgtttgtgttcacggtgatggcgcgcacgcattggcttttgctcgtcgcctctatgacagttttatacagaaaaatatcagcatcagtgcgagttgatagggcgtcaataatcataaccgcctagcccgggcggaataatagtgaacacttgatcagaacccaggataggagaatacatttggaacagaccgtaaatttctggccgcttattggtattgcggcaattatcatcggatttttaatgcgtattaatgccgtattggtggtgattaccgctggcattattaccggcgtagcggctttgatgcctattgccaccatattagagaaactgggtgaaggttttttgaatacacgaaacctgccgctgattttattactgccgctggcggtaataggtttattggagcgccacggcctgaaagaacgggcgcaggcgtggatttcaaaaataaaaagcgccacctccggtcggctgctgatcgtgtacctgtttgtgcgtgaagccacagcagcgctggggttaaccagtctgggcggacatccgcaaatggtccgtccattattggctccgatggccgaaggtgcggcggaaacacgttatggcgagttaccggagaaagttcgctaccgtttgcgcgctatgtcggcggccacggataacgtgggattattttttggggaagatatattcgtcgctttcggtgcgattatctttatgcataactttatgttggaatctggcggtattcaaaccgaaccgctgcatattgccctgtggggtattccgactgcgatttgtgcatttatcattcacgcatatcgcttgcagcgtttagataaacaattggcggcagaactgacggcgctgaatcagtcggcattagctgagaaaggggcgtcgaaatgattttccaacaacaatatctctattggctggcgggcgtagtgctgctgattgtcgccttgatgtcatttcgcgataaagctaacccgcgtcgaattaccaccggtttgttttggggattgtacggactgttttttctggtaggagactggacgtaccgtttggccaattcgctgggcggcgacggtccggatgaaaaacgcattctgaatatcaccgtgggcgtggtggtggtcattatggcgctgatcgccggttttggtggcgttcgattgggtagctatcatcagcgcacgccggtggaacgcgaagtgagcgctaagaaactggggaaccgcctgtttattccagcgctggcaattccagtcgtgacggttattggcgtactgttattcaacaacattccagcgttagatttgtgggtgtttggtagcggtaaccatgccactttggtgacgctgttctctatgactctaggctgtgtgctcggcctgattattgccgtggtgatgacgaaagaaaccgccgcgcagccggttcaggaagcgcggcgtttactggattccatcggttgggcctttattctgccgcagatattagccactttaggcctgttattcaccaccgcaggcgtgggaacggcgattgctcatttgacgcaagaatatctggctgtcgatcatcgctttatcgccgtagccgtctatgctatcggcatggcggtgctcaccatgattatggggaatgcgtttgcggcattccccattgtcaccgctgggatcgggatcccaattctggtatcacagcacggcggtaatccggcagttatggcggctatcgggatgttttccggctattgcggcacgctaatgacgccaatggcagctaactttaatatcgttccggcagcgttactggagttgcctgacaagaatgcggtgattaaggcgcagattccaaccggcgtaactttattgattgttaacgtattcttactgtatttcctgatgttcctgtaggagaagtgatgaaaaacgtattaattaccggttttgagccttttggcggcgagcgggtcaatccgtcgtgggaagtggtcaagcaattgaatgatttgcagctttccggcgttcgggtggtggctcatcagctgccctgcgcttttggcgaagccttaacatcgctgaatgcggccattgatgccactcagccggtattggttctggctattggacaggccggtggtcgtgcagatatcaccattgaacgcgtcgcgatcaatgtggatgatgcgcgtattgcggataatctgggacaacagccggtagaccagccgattgtgcctgatggcccggtggcgtactttacccgtttgcccatcaaagccatggtgcagggaatccgcgaggcgggaataccggcgtcggtttcccaaacggctggaacctacgtgtgtaaccatgtgatgtacggtctactgcatcgtttacatcaacaggacaacgaggtgaaagggggatttattcatatcccttatttgccggagcaggcggtaaaccaccccggttcgccaagtatgtcggctcagtccgtcctgatcgcgctggaagttgctatttctgtggcgttgcaaattgaacatgatttgcacatatccggcggcgcgacacactgatccctattggaataatcaataaaaaagcggagggcgacttccgctttgtcgttttaaggaggagcagaatgccggaaggcccggaaattcgtcgcgctgcggataaacttgccgaggcggtgataggcaagccgttgaaacaggtgtggtttgcttttcctcagctcaagccttatcaatctttgctgcttaatcagcaggtcaatgaaatacaaactcggggcaaagcattgttgacgcatttctccgatggattgacgctgtatagccataatcagctgtacggagtctggcgagtggttaaagcgggagaaacgccacagactaagcgagatctgcgaatacgactggaaacggccgaccaggccattttgctctacagcgcctctgatatagagattgggccgcgtgaagtgattgaacaacatccctttttgcagcgtattggcccagatgtgctggatatggcgctcacggaaaatgacgtgattgcgcggttattgtcgccgcagttttgccgtcggcaattgggcggaatgctattggatcaggcatttttggcgggattaggcaattatttacgcgcagaaattctgtggctggcggcgttggcaccaacgcataaaccgcaggatctccccccagaggcattgcaggcgttggcttcggcgttattggcggtgccacgcctttcctacgcgacgcgcggcgtagtggatgaaaatcatcatcacggcgcattattccgtttcaaggtcttcaatcgtaccggccagccttgcgcgcgctgcggtgagccgattgaaaaaattgctatttcttcgcgtcctttctattggtgtccggcctgtcagcattaattatcaatgataaaacgcgtttttcagccataaaaaacgccactgaaaagtggcgtttgatgatcgggtcgcgcctagattcagtgcgcgacgggagtcaatttacttcttgatttggctagtgaaatcgcgttctgcgtagccggtgtacagctggcgaggacgagcgattttcaggccttcatcatgcatttcgttccagtgagcaatccagcctatggtacgggcgatagcaaagatcacggtaaacatggaggaaggaatacccagcgctttcaggatgatacctgagtagaaatctacgttcgggtacagtttcttctcgatgaagtacgggtcattcagggcgatacgttccagctccatcgccacttccagcaggttgtcattcaggttgagttctttcaacacttcatggcaagtctcacgcatcacggtagcgcgtggatcgtggtttttatacacccgatgaccgaagcccatcagacggaaggagtcatttttgtctttggcgcgacggataaattcaggaatgtgctcaacggttttgatttcttccagcatcttcaggcaggcttcgttcgcgccaccgtgagccggtccccacagggacgcaatcccggcagcaatacaggcaaacgggttagcgccggaagaaccggcggtacgcacggtagatgtggaggcgttttgttcatggtcagcgtgcaggatgaagatgcgatccattgcgcgttccaataccggattcactttgtattcttcacatggagtagagaacatcatgtgcaggaagttaccggcgtaggacagatcgttacgtggataaacgaaaggctggcctagggaatatttgtaacacattgcggcaaccgttggcattttggacagcaaacggaaagcggtaatttcgcggtgacgctcgttgttaacatccagtgcatcgtggtagaaggcagccagtgcgcctgtcacgccgcaaagtacggccattggatgagagtcacggcggaagccttgcagcagtcgggtaatctgctcatggatcatggtgtgacgggtcacggtagttttaaacgtggcgtattcttccggcgttggcgtttcaccgtacagcaagatatagcacacttccagataggtagattctttcgctaactgatcgattgggaagccacggtgcagcaaaataccgttatcaccgtcgatgtaggtgatttttgattcgcaggacgcagtggaggtaaaaccgggatcaaaggtgaaatagcctttggaacctaaggttcgtacgtcgataacatcggtacccaaagtcggggatagtacgcccagttcaatcgtagcttcgccagtcaaagttagcgtcgctttcttgtcagccatttacagtctccttagcgctatattttaaaatccttaacaaccgtaatgtcttttgtgcctgcggcatgccttatcggttatcagcagcaccctgttttattcatcgttcaagtcgcgatttagggtacagagcatgttgctaatagaaccaacaatccggcacgttggagtgtcaggcgacgttacgtgattgttaacgatttgtcggatacttatatttttctaatcattgcctacgagattattaggggtatttacttacacactgttgcacaacttatgtccataaggaagtgtatccgtagacctttcgtgcatcatagggcttatttatcccttagttgtaatggaaatgtttattctttgtcaaatcagataattaattttatttaaattgtgtaaatcgtgatcctaatcactgttcaaggcaaatgttatcaatcagtttgtgtgggaattgtaataagaatgtgaaccccctatactgccgccaggtctccggattaccctgaagtaggagcacccagcgttatacagagcacacattttttgacactcaggacgtaatgtgaaatttgtgatgtgaagggttacgactcataacgctgtctgatccccgcccaggccggaggaaggaaaataataagagctgtgtgggcaaaaccgtgaaaaaacaaagacctgttaacttggatctgcaaaccatccgatttcctgttactgcgatagcgtccatcttacatcgagtctctggcgtcattaccttcgttgctgtgggtatcctcctctggctactgggtctgtctctctcgtcctacgagggattcctgcaggcctccgccatcatgaatagctttattgttaaattcatcttctggggaattctcactgcgctggcctatcacattgtcgtgggcatccgccacgtattaatggattttggctatctcgaagaaagtttagcggcgggtacccgttctgcccaagtggcgatgggcatcaccctggtgctgtcagttctggctggagtcctggtatggtaagcaatgcttctgcgttagggcgtaatggtgtacacgactggctgcttctgcgcgcgtctgcgatcgtcattaccctatatgtactctacatcctgggctttgttgccattgccccggacatcacctacgaaatctggcgtggcttcttcgcctcttccatcaccaaagtctttaccttgctgacgctgctgtcgattcttgctcacgcgtggatcgggctgtggcaggtattaacggactatataaagccattagcgttgcgtctggtcttacagctggtcgtggtgattacgttattggtttacttactgtacggaactattgtggtgtggggagcttaaatgaaactgccagtcagagagtttgacgctgttgttattggtgcaggtggcgcaggtatgcgcgcagccttgcagatttctcaaatggggttgtcttgcgccctgatttccaaagttttcccaacccgttctcatacggtatctgcgcagggcggtattaccgttgcgctgggtaacacccacgaagataactgggaatggcatatgtacgacacggtgaaaggctccgattatatcggtgaccaggacgccattgaatatatgtgtaaaaccggcccggaagcggtgctggaactcgaacacatggggctgccgttctctcgtctggaagatggctccatttatcagcgcccgtttggtggccaatcactgaacttcggcggcggtcaggcggcacgtaccgctgcggcggctgaccgtaccggccatgcgctgttgcacaccctttatcaacaaaacctgaaaaaccataccactatcttctccgagtggtatgcgctggatttggtgaagaatcaggatggcgcctttgtcggctgtaccgcaatctgtatcgaaaccggcgaagtggtttatttcaaagctcgcgcgacggtattggctaccggcggagcagggcgtatttaccagtccacaaccaatgctcacattaataccggcgacggcgtcggcatggctctgcgtgccggcgttccggtgcaggacatggaaatgtggcaattccaccctacgggcatcgcgggtgctggcgtactggtgaccgaaggctgtcgtggtgaaggcggttatctgctgaacaaacacggtgaacgctttatggaacgctatgcgccaaacgctaaagatttggccggtcgcgacgtagtagcccgttccatcatgatcgaaattcgtgaaggtcgtggctgtgacggtccttggggcccacacgccaagctgaaactggatcatttgggtaaagatgttctggagtcccgtctgccgggcattctggaattatcccgcacctttgctcacgttgatccggttaaagagccgattccggttattcctacctgccactatatgatgggcggtattccgaccaaagtgaccggtcaggcgattaccgtgaatgaaaaaggcgaagacgtcgtgattccgggtctgtttgccgtcggtgagattgcctgcgtatccgtccatggtgcaaaccgtctgggcggcaactcgctgctggatctggtggtatttggtcgagcagccggaatgcacttgcaggaatccttaatggagcaagggccaagccgtgatgccagcgattcggatattgaagcctcgttggatcgtatgaaccgttggaataacacgccaagcggtgaagatccggtggaaatccgtaaagccttacaatcttgtatgcagcataacttctcggtattccgtgaaggtgatgccatggcaaaagggttggaagaactgaaagtgattcgtgaacgcctgaaaaatgcgcgtctggacgacacttccagcgaatttaacacccagcgtatcgaatgtctggaactggaaaacttgatggaaacagcgttttccacagcggtgtccgcaaacttccgaaccgaaagtcgcggtgctcatagccgtttcgacttcccggagcgtgacgatgcgaactggctgtgccactcgttgtatctaccgcaaaccgagagcatgacccgccgtgaggtgaacatgcagccgaagctacgcgcggcgttcccgccgaaagtgcgttcttactaacgcgtttgccgagttaacccgttgcggaggagtgagtcatgaaactcgaattttcgatttatcgttataacccggacgttgatgatgcgccgcatatgcaggattacagcctggaagcggaagaaggccgggatatgatgctgctggatgcgctaattcagctgaaagaacaagatcctaccctgtctttccgtcgctcctgtcgtgagggcgtgtgcggctcagacggattgaacatgaacggtaaaaacggcctggcctgtattacgccggtttcggcgttaaccaatggtcgtaagaagattgttattcgcccgttgccgggtttgcctgtggtgcgtgatttagtggtcgatatgggccagttctacacccaatacgaaaaaattaagccttacctgcttaatgacggcaaaaacccaccggcgcgtgagcatctgcaatctccggaagagagggcaaaactggatggtctgtacgaatgtatcctgtgcgcctgctgctcaacctcttgcccgtcgttctggtggaacccggataagttcgttggacctgctggtttactcgctgcttatcgcttcctgatcgacagccgtgatactgaaacgcagtcgcgtttagacgaccttaacgatgctttcagtgtcttccgttgtcacagtattatgaattgtgtgagtgtttgcccaaaaggccttaatcctactcgcgcaataggccatattaagtctatgttgttgcaacgaagtgcatgatgtgagtttataaacccggggaataattttcccgggtgataataaaggtagggaatctctaaaagccgacgctgttgtctgtttctagaggttccttgaaagggaccgataaggtccatagcagaacgtgcattgagcacgtcgagtgaaccgtttttacggcaaaccgtttacttcacggtatatatgttaaccacggcgaaaactgaagcttcaaagcttaagggatcatgatgcagaacggcgcaatgaaggcctggctggattcctcctatctggcgggcgcgaaccagtcctacatagagcagctctatgaagattatttgacagatcctggttccgttgatgatagttggcgttcgatttttcaacaactaccttctacgggtgtaaaacctgatcaattccactctcaaacgcgtgagtacttccgtcgactagcgaaagataccacccgttataactccgcgatcaacgatcctgatactgatgccaagcaagttaaggtgttgcagttaatcaacgccttccgcttccgcggccatcagcatgctaatctcgatcccctcggtttatggaaacaggaagaggtgccagatctcgatcctgcttaccacaacctgactgaagcagacttccagaacaccttcaacgtgggttcttttgccatcggcaaggaaaccatgaagttggccgatctgtatgccgcactgaaacagacctattgcgggtctatcggtgccgagtacatgcatatcaccaacactgaagagaaacgctggattcagcaacgtatcgaatctgtcgtagggaaaccaacgttcagtgatgaagagaaacgtcgtttcctgagcgaactgaccgctgcggaagggttggagcgttatctgggagccaaattccctggtgccaaacgattctcgctggaaggcggcgattcgctggtgaccatgttgaaagagatgatccgtcacgcaggtaaaaacgggactcgcgaagtcgtactggggatggcgcaccgtggccgcctgaacgtcctgattaacgtgctgggtaaaaaaccggaagatttgttcgatgaatttgccggtaaacataaagaacatctgggtacgggtgacgttaaatatcaccagggtttctcctccgatgtagaaactgaaggcggcctggttcatctggcgctggcctttaacccgtctcatttggaaatcgttagcccggttgtcatcggttccgttcgcgcccgccgcgatcgtctggataaagctcgcagcaatatggttctgccaatcaccattcatggtgatgcggcgattaccggtcagggcgtggttcaggaaactctgaacatgtcgcaggctcgtggttatgaagttggcggcaccgttcgcatcgtcatcaacaaccagattggtttcactacttccaatccgcaagatgcccgttcgacgcagtactgtaccgatatcgcgaaaatggtgcaggcgccgattttccacgtcaatgctgatgatccggaagccgtggcgtttgtaacccgtctggcgttggatttccgtaacacctttaaacgtgacgtgatgatcgatctggtctgctatcgccgccacggccataacgaagccgatgagccaagcgcaactcagccagtgatgtatcagaagatcaaaaaacacccgacgccgcgcaaaatctatgctgacaagctgactgagcaaaaaattgccagcctggaagatgccacggaaatggtcaacctgtatcgcgatgcgttggatcacggagattgcgtggttgaagaatggcgtccgatgaacctgcaatccttcacttggtcaccgtatctgaaccacgagtgggatgaagaatatccgagcaaagttgagatgaaacgcctgcaagagctggcgcgtcgtatcagccaggcgccggacgctatcgaaatgcagtctcgcgtagcgaaaatctacggtgaccgcgctgaaatggccgcaggcaacaaaccgttcgattggggcgctgctgaaactctggcctacgccacgctggtagatgaaggtattccgattcgtctttccggtgaagatgcggggcgcggtaccttcttccaccgtcacgcagtgattcataaccagaaaaacggctcggtgtatgtgcctttggcaaatattcacagcggtcagggtgatttcaccgtttgggattccgttctatcagaagaagcggtactggccttcgaatacggttacgctaccgcagaaccgcgtaccctgactatctgggaagcgcagttcggtgactttgccaacggtgctcaggtggttatcgatcagttcatcagttccggcgagcagaaatggggccgtatgtgtggtctggttatgctgttgccgcatggttacgaaggtcagggtccggagcactcctccgcccgtctggaacgctatctgcaactgtgtgccgaacaaaatatgcaggtgtgcattccttctacgccagctcaggtttaccacatgctgcgccgtcaggctctgcgtgggatgcgccgtccgctggtcgtcatgtcaccgaaatccttactgcgccatccgttggctgtgtcttctctggatgaactggctaacggtactttcctgccggcaatcggtgaaatcgacgaattggatccgaaagcggtgaaacgcgtagtgatgtgctctggcaaggtctactacgatctgctggaacagcgtcgcaagaacgatcagaaagatgtcgctattgtacgtatcgagcagctttatccattcccgcatcaggcagttcaagcggttctggaacagtatgcccacgttcatgactttgtctggtgtcaggaagagcctctgaaccagggtgcctggtattgcagccaacataacttccgtgaagtgattccttttggttcctctttacgctatgccggccgtccggcctctgcctctccggcggtaggttatatgtctgtacaccagaaacaacagcaaagtttggttaatgacgcgttgaacgtcgaatagctaattgtttaaaacacaagggatagataatgagtagcgtagatattctggttcctgacctacctgaatccgtcgcggatgcgacagtggccacctggcataaaaaaccgggcgacagcgttcaacgtgacgaagtcctggtagaaatcgaaactgacaaagttgtgcttgaagttcccgccagcgaagcagggattctggactctattctggaagacgaaggcgcaaccgtgctttctcgccagattctgggtcgaatccgtccgggcgatagctcaggtaaaccgacagaagagaagatccagagcaaagaatccacccctgctcaacgtcaaaccgccagtttggaagaagagagcaatgacgccctcagcccggcgattcgccgcctgattgcagaacattctcttgatgccagcgctattaaaggcagcggtgtcggtggtcgtattacccgtgaagacgtggaacaacacctggcgaacaaaccggcagcgccgaaagccgccgaagccaaagtggaagttgccgcacctgcattgggcagccgcagtgaaaaacgtgtaccaatgacccgcttgcgtaaacgcgtggccgagcgtctgctggaagcgaaaaacagcactgccatgttgacgactttcaacgaaatcaacatgcagccgatcatggatctgcgcaagcagtacggtgaggctttcgaaaaacgtcacggtgtacgtttgggctttatgtccttctacatcaaagcggtagttgaagccctgaaacgttatccagaagtgaacgcttctatcgatggcgaagacgtggtttatcacaactacttcgacgttagcatcgctgtttctactccacgtggcctggttacaccggttctgcgtgatgtagacacactgggcatggctgatatcgagaagaaaatcaaagaactggctgttaaaggccgcgatggcaaactgaaagtggaagaactgaccggcggtaacttcactattaccaacggcggcgtgttcggctccttgatgtcgactccgatcattaacccaccacaaagcgcgatccttggtatgcatgccattaaagatcgtccaatggcggtaaatggtcaggtagtgatcttgccaatgatgtacctggcgctctcttacgatcaccgtttgatcgatggccgtgaatctgtcggctatttggttacggtgaaagagatgctggaagacccagcacgcctgttgctcgacgtataaaaaagataacggttaaaggctgcctgacggttggggaatatcccgatctgtcaggctcctgacgccataaatctagtgttaaaaaacctatgtgttaacaaaaacctatgtgctaattgcggtcgatcccagggtcggcattatccagacactgcggggctcgtcccgtctacagacttaaatggatagaacatcatgaatttacacgaatatcaggccaaacaactgtttgctcggtatggtctgccggctccaaccggttacgcctgtaccacaccccgtgaagcagaagaagccgcatcaaaaatcggcagcgcaccttgggtggtaaaatgtcaggttcatgctggcggtcgcggtaaagcgggcggcgtgaagctggttaatagcaaagaagaaattcgtgcttttgcggaacactggttaggcaagcagttggtcacttaccaaactgacgcccacggccagccggtacaccagattctggtagaagccgcgaccgatattgataaagaactgtatctgggcgctgtagtcgatcgcggttctcgtcgtgtgatcttcatggcttcaaccgaaggcggtgttgaaatcgagaaagttgcggaagaaacgccggaactgatccacaaaattgctctggatccactggcgggtccgcagccataccaaggccgtgagttagccttcaaactgggtctaaccggtaaacaagtcagccagttcaccaagatctttatgggtctggcagcgctgttcctggaacgcgatctggcgatggttgagatcaacccgctggtgatcaccaaacaaggtgatttggtgtgtctggatggcaaactgggtgcggacggtaatgccctgttccgtcaaccagagctgcgcgaaatgcgtgaccagactcaggaagacgcccgtgaagctcaggctgcgcagtgggaactgaactacgtcgcgctggatggcaacatcggctgcatggtcaacggcgcaggtctggcgatgggtactatggacatcgtgaaactgcacggcggcgaaccggctaacttcctcgacgttggcggcggcgcaaccaaagaacgcgtaaccgaagcctttaaaatcattctgtccgacgacaaagtgaaagcggtgctggtcaatatctttggcggtatcgtacgttgcgatctgattgctgacggcatcattggtgcggtagcagaagtgggtgttaacgtaccggttgttgttcgtctggaagggaataacgctgagttgggtgccaaaaagctggcagacagcggcttgaatattattgctgcgaccagcctgacagatgcggctcagcaagttgttgcggcagtggggagtaaataatgtctattttaatcaataaaaacaccaaagttatttgccagggtttcaccggcggccaagggactttccactccgaacaggcgattgcttacggcactaaaatggttggtggtgtaacgccaggcaaaggcggcactcagcatctgggtctgccggtatttaataccgtgcgtgaagccgtggaagcaaccggtgcgaccgcttcggttatctacgtgccggctccgttctgtaaagattccatcctggaggcgattgacgcaggcattcagctgattatctgtatcactgaaggtatcccgacgctggatatgctggttatcaaagtgaaactggaagaaagcggcgtgcgcatgatcggtcctaactgtccgggtgtgatcaccccgggtgaatgtaaaatcggcatcatgccaggccatattcatctgccaggcaaagtgggcatcgtttctcgttcgggtaccctgacttatgaagcggttaagcagacgactgatattggcttcggtcaatcaagctgcgtcggtattggtggcgatccgatcccaggctctaactttatcgatatcctgaaactgttccaggaagatccgcaaaccgaagtgattgtgatgatcggtgagatcggcgggaccgcggaagaagaagccgcagcctacatcaaagatcacgtcaccaaacctgttgtgggttatatcgccggtgtgactgcgcctaaaggcaaacgtatgggccatgctggcgccatcattgccggtggtaaaggtacggctgaagacaagtttgcggctctggaagcggcaggcgtgaaaacagttcgtagcctggccgatatcggtgacgcggtgaaagaagttttacctcagtaagctgacttaagtcattcgagcggcggcaagagggtagacaggtgaacccgatgagtttaggcgactaagtgatttgggcgatcgggttaagccaacgcagaggcagcttgaggcatacaggtctagatatagataaaaataacgattagctcgacatatattggccaccttccggtggccttttttttataaagaaaccgcgtgaaccttccgatatcgcagaattcccctccgttagagaggggagggcatcagaaattattcagggcggtaatcagtatcatatccgtttgtgcctgctgcttagcttgctcgcttttagcgttgccaagctgctgctgaagtgacgccagcgctgcgttatagctggctttatcgctaaacagcttatccttaacgttaatcgatgcgatattggtaaaacgtccgtcttcggtggtaggaaccgctattttcccttcattgattagctttttcaccacttctcgctgcggttcataaccttccaatccaaccagcttccaacgttgctcggtttttccttggtattgaccgtgtttgacctcggttagataacggatggtcagattacgaatggtgccgtcctcttcgccatattctgccttagtatcggaaagtaccgggaactgctgacccgccagtacaccacctttctgagtcaaatgtcccattcgatagctgttcattcctaagcgaattggcgtgctatcggtaacggcttcgccatggttaaaacgtaaattggtgatacgtgaacccgcaggttggcgtaggtcgatggtgtaggtgacgccatcaaagaaatcattggtggaatatttagacgcgcgacgttgcggattaaaactgtaggtgacatcgcccggtttaacctgattgaaataatcggctgaccactccatatattttttcagttctttacccgtaagctgataaaccgttatttccccgccggcgtattgatagttaaaagcaatatctttagcttttatctcacctaaatctaatttagctcggtcattatcgatctgtaaggcaataacttgcgctttaggcgcatagtggcgtgcggcttcctggaacagagcactgataccggtatcctgaatatgtacttgcggaatgccttttatctcatctttaggcactaagtctactccgcttagggtcgcaataacccgatttgcattggcgcgcaaaatactgtgataaggctgataaatagcttcaagttctttatcagaatgaattcctttgatggggtaggtataactgtctttattgattaaatgatattttccatcccgctgttcaaattgcaaatcgatacgggaaagggcgcggccatatttatccggttcagtaataataacgccgttcactacggccttatcaattttgacgtgcatatggcccgcgactatggccgctagctccgggttggctttggcaatgtcccccacgccagtaccgggacgctggttctcgttatcaatccccatatgggcaaccagcacgatagcgtcgacctgcggctgaatttgttgaatcaccttcttaacttcttgcacaggatcggtaaaattcagccccttgatacgatcggtaccttgggcaaattccgctgtcattggcgtatccataccgatgatgccgattttgacgccctggcgttcgataatcttataagagggcaggtaaggcttgccgctgtcccagaagatattccccgccagagcggtacctttaaactggtttaaagaggtggatagaaccttcagaccgaaatcgaattcgtgattacctagcacccaagcatcgtaattcagggcgttgaaaccgagcatcatcgggctgacggcctcgtttttaaaggtttccacgaagttgccctgaatggtatcaccggcgtcaaccaaaatgatattgggctgttcggcgcggatttttttcacctgcgtggcgatttggctcaggctgccggccagattttcactgtcgctggcatagtcccagggaacgaaggtgccgtgcagatcggaggtacctaaaatcgtcaggttgacagtttcagcggcgaaggaggaagaggtgctgatacaaagtaaggaggcgagcgctatttttttcattttaatcttcttgaaggggccaatgtttcatcatgtaaccgaattttatgatgcaacaaaatagcaacacaagcgaacgcttccccaagaatcgattaatatattcatataaattgttaagttgtgattcaactcaccatgaagattataaattaaaaaagttaatcttgatcgcggaaaaatgaaaaaataaatcattacttaaaccattaaatcacatttatttaacactggaggtttatataaaaatatttgaacgattaattaacacctccagaagaaaattgttctaaatcaagttttcaatatggcaataatgttcatatgagcttaaattgttctggatcaatttgtcctgctatcgataattagttggtttgttgacctgtatccagaactcaaagccaggtcacgtaaaatcctatttattgtatgggattagaagcgtactattatcgcggtgtaatactgggtagttgatattgttatttttgttgtgtttttttgggcattcactgctggtagttatgagacttccaattatagcggaggtcgcgttgccgcaagtcggagtcttcctgcgaggagcaaggagtcaagatgtttgatattgtcgaactgtcacggttacagtttgccttaacggctatgtaccatttcctatttgtcccgctaacgctgggtatggcgtttatgctggcaattatggaaacggtttacgtactgtctggcaaacaaatctataaagatatgaccaaattctggggcaagttatttgctattaactttgctctgggggtcgctacgggtctgactatggagttccagttcgggactaactggtcatatttctctcattacgtcggtgatatcttcggtgcccctctggcaatcgaaggtctgatggcgttcttcctggaatctacttttgttggtctcttcttcttcggttgggatcggttaagtaaacatcagcatctggccgttacttggctggttgcattggggtctaacttctctgccctgtggattctggttgccaacggttggatgcaaaacccaattgcggcggatttcaacttcgaaaccatgcgtatggaaatgctaagtttctctgagctggttctgaacccggttgctcaggttaaattcgtgcataccgttgctgctggttatgttaccggtgcgatgtttgttctgggtatcagctcgtactatctgttgaaaggccgtgatattccgtttgccaaacgttcctttgctatcgctgccagctttggtttagccgcgacgctgtccgttattgttctgggtgatgaatccggttacgaaatgggtgacgtacaaaaaaccaaacttgctgcaattgaagccgaatgggaaacccagccgcctccggcagcctttacgctgtttgctattcctaatcaggaaaaaatggagaactcgttcgccattcaaattccttatgcattaggcttgattgccactcgttcattggatactccggtgaccggcctgcgcgatctgatgtcacagcacgaagtccgtatccgtaatggtattcaggcttatcgtttgctggaagaactgcgtgcgggtaacaccgatccggctgttcgtgccgagttcaacaaaaccaagcaagatctgggttatggcctgttgctgaagcgttacacgccgaacgtaactgacgctaccgaagcgcagattcaactggcagcaaaagactctattcctaaagttctgccgctgtacttcgcgttccgcatcatggtggtctgtggcttcctgctgttgctgattatcggtctctcgttctacaacgtatgccgtggtcgtatcggtgagaaaaaatggctgcaccgtctggcgctgtggggtattccattaccttggatcgcgatcgagtctggctggtttgtggctgagtatggccgtcaaccttgggcaatcggtgaggttctgcccactgccattgccaactcttcggtgacagcaggggatattctgttctccatggcgctgatttgcggtctgtatacgctgttcctggtcgcagaaatgtacctgatgttcaaatttgcgcgccttgggcctagtagcctgaaaactggccgctatcactttgaacagccgactgcgcctgcgcaagaagcacggtaaacgggagtccacttatgtttgattatgaagtattacgatttatctggtggctactgattggtgtgctactgataggtttcgccgtcaccgatggttttgatatgggcgtaggtatcctgctacgcattatcggtaaaaccgatactgaacgccgtgtcatgattaactcgattgctccccattgggatggcaaccaggtttggttgattaccgccggtggtgcgctgtttgccgcgtggccaatggtgtacgccgctgccttctccggtttctatattgcgatgattctggtgttggctgcgttgttcttccgtccggtcggttttgactaccgctcgaagttggaaagcagccgctggcgcaatatgtgggactggggcatcttcatcggtagcttcgttcctgctgtagtgttcggcgtcgcctttggtaacctgctgcaaggtgttccattccatatggatacctacatgcgcttgttctacaccggcaacttcttccaactgctgaacccgttcggcctgttggcgggcgtagtcagtctggccatgttggtgactcagggtgctacctacctgcaaatgcgtacccgcggtgaaattcatctacgttcccgcgctgccgcacagatttgtgcgttagtgatgggcgtagccttcctgctggcgggtatctgggtagtgaaaggtatcgacggttttgtgattacttcagcgctgaacaccgctgcggaatccaacccgatgcgtaaagaagtggcacatcaggcgggcgcctggttgattaacttcaacaagtacccaagcctgtgggcgctgccagcgttaggggtaatcctgccgttgttcaccatcctgttctcgcgtatggaaaaatgcgcgttggcgtttatctcctcgtcactgacgattgcctgtgtgattttgactgccggggttaccatgttcccgttcgttatgccgtcaagtaccatgccgaacgttagcctgacaatgtgggatgcgacatcaagcctgctgacgctgaaagtgatgaccattgttgcgattatctttgtgccgctcatcctgctctacaccagctggtgttactacaagatgttcggtcgtatcgataaagaatatatcgaaaacaacaagcactcactttactaaggagcataaagcatgtggtattttgcctggattctcggaacacttctggcctgctccttcggtatcattactgctctggcgctagagcagagtgaggccaatgcggcggagaagaaagccgctaaaaacggcagcgaagatgttgtccgataagttgtacgctttaatggataagggcccgctgcgggccctttcacttattctcgccttcacgctggctttctgtattttctgggacccgacgcgctttgccgccgccaccagttcgttagaagtctggcaagaggtgtttttagtgtgggctgtctgtactggggtcatccatggcgtaggttttcgaccgcagcgggtatggctgagagcttttttctcgcctcttcctgcaattgtgatcttaggcgcgggaattttccattttttcgcctaatcttgcagctaatcatccctatgggccgttcggcccataattattttcgttctcaccttgcaagtcattccaaaccgaatcgctcttcagtatagtgtgtccgttaattgcattactgggaagtagagtgagtaatacgttatttcgatggccggttcgtgtctactatgaagacaccgacgctggtggcgtggtttaccatgcgcgctacgtagccttttacgaaagggcgcgcacagaaatgctgcgccaacgcaattttcaccagcagcaattgttcagtgagcatattgctttcgctgtccgacgcatgacggtagagtatctttctccagcacgtcttgatgatatgctagaggtggagagcgaaattactgaaatgcggggggcctctctctcgtttgctcaacgaattttcgattcccatggcaatcttctgagtagtgcagaagtattggtcgcatgtatcgatctacacaaaatgaagccaaaagcgcttcccaagtctattgtcgcggagtttaagtagtggctgacatgaacattctggatttattcctgcaggcgagcctattcgttaagcttatcatgctggtactgatgggcttttccattgcgtcttgggcaattatcattcagcgaacgcgcgttctgaatgctgccacacgtgatgccgaagcctttgaagacaagttctggtccggcattgagctttcccgtttatatcaggaaagtcaggcgcgccgcgatagtctgggtggctcagagcaaattttccactctggttttaaagagtttgctcgtttgcatcgcgcaaacagccatgcgccggaagccgttatcgacggcgcctcccgtgctatgcgcatctcgatgaaccgcgagctggaagcgttggaaaaccatatcccgttcctgggcaccgtcggttctatcagcccgtatatcggtctgtttggtaccgtatgggggattatgcacgcctttatctccttgggcgcagtgaaacaagcaactttgcaaatggttgcaccgggtattgctgaggcactgattgctacggcgattggtctgtttgcggcaatccctgcggtaatggcgtataaccgcctgaatctgcacgtcagcaagcttgagcagaactatgacaactttatggaagagttcattgctattctgcatcgccaggctttcgccagcaccgagagcaaataagtagggggttgtatggcgcgagtacgtggtcgtagacgtcgcgagcttaagtctgaaattaacattgtgcccttgctcgacgtattgctggtattgctgctgatctttatggccacagcgcccatcattacacaaagcgttgaggttgatttgcctgacgctacggattcgaaaacggtatccagcgatgataatccgccggtgattgtggaagtttctggtgttggtcaatatacggtggtggtcgatcatcaacggatggagcagttgccagagcagcaggttgttgcggaagctcaggcgcgtctaaaagccaatccgaaaaccgtgtttttgatcggtggtgctaaagaagttccttatgatgaaatcatcaaggcgctgaatatgctccatcaggctggcgttacttcggttgggctgatgactcagccgatctaagtctgtgttgatgtcgattaagcgcgaaatatcgctgtatcggcattgaccctgtttttgaatatcgagtgtggaaatcgagcgtgggaaaggcaaccgagcaaaacgataagttgaatcgcgccgttattgtttcggtcgttctgcacattatattaattggcctgctaatttggggctcgttgacgcagaagactgaaatgggcggcggcggagctggcggcgaagtgattgacgccgtgatggtcgatcccggtgcgataacacagcaatataatcgccagcagtcacagcaggctgacgcgaagcgcgctgaagaacagcgcaagaaaaaagccgaacaacaggcagaagaattacaacagcagcaggccgcagagcagcagcgcctgaaagagctggaaaaagagcggctacaggcacaggaacaggccaagcagtcggcggaagaacagaaaaaagcggcggctgagcaacaaaaacaggccgccgaacagcaaaaacaagcggcagaggcagcagccaaagccaaagaagaacagaagcaggccgaagctgcggctgctaaagcgaaagctgaagccgagcaggtagtgaaagccgccgccgacgcgaagaaaaaagccgaagcagatgcgaagaaagaggctgccgtagcggcggcagcgaagaagcaggcagaggctgacgccaagaaagcggcagaagatgcgaagaaggccgcagaaaaagccgctacagaagctaaacagcaggccgctgaagccgcagagaagaaagctgccgccgacgctgagaaaaaggctgctgctgatgccaagaaagccgcagcagatgcgaaaaaagcggctgacgccaagaagaaggcggcagcagaagcagcgagtgctacggatgttgacgatctctttggtggcctggcgtcatccaagaatgcgccaaaaagtggtactggcgcaggtgaagccgcagcaggtaaaggcggtggcaagaaaagcggtgcgtcgggtgcagaaatcagcggctatttaggccagattactgcggcgattcagagtaagttttatgatgcagacttgtacaaaggccgcacgtgcgatctccggattaaactggcaccggacggtctgttgatagacgtaaaagcggaaggtggcgaccctgcattgtgtcaggccgcgatagccgcagcgaaacaggctaagattcctaaaccaccgagtaaagatgtttacgaagtatttaagaatgcgccggtttcctttaagccacaataagtgttgattaacggggtataagtttgttaatcaaccacggattatgtagttttgtttgcgttggtttgttaaaattctgctaattatcgcgggcattccgctcggataagggagacaagatgaagcaggcatttcgagtagcactaggctttttagttttatgggcatctgtgttacacgcagaggttcgcattgagataacccaaggggtggactctgctcgtccgatcggcgtagttccgttcaaatggatggggccgggtacgcctcctgaagatatcggcgctatcgtgggtgcagacttacgcaacagcggcaaattcaacccgattgacgtggcgcgtatgccgcagcagccgtctaccgcagcggaagtgacgcctgcggcatggactgcattaggcattgatgccgtggttgtgggtcaggtacagccgggcgctgatggcagctatttggtttcttaccaattagttgatacagcaggtgcagcgggaagtattttggcgcagaatcagtataaaataaccaagcaatggttacgttattctgcccataccgccagtgatgaagtatttgaaaaactgaccggtattaaaggggcgttccgtacgcgtattgcctatgtagtgcaaactaacggtggcaaattcccgcatgaattacgtgtttcagactacgatggctacaatcagtttgtagtacaccgttctcctgagccactgatgtcaccggcctggtcggcggatggcagcaaaattgcttatgtaacatttgagagtggcaagtctgcactggttattcaaacgttggcgaacggcgcaatcaaacaggttgcttctttccctcgtcataacggtgcaccagcattctcacctgacggtaccaaactggcgttcgctttgtctaaaagcggtagcctgaatctctacgtgatgaacctggcgtctggccagatcagtcaggtaacggatggccgtagcaacaatacggagccaagttggttcccggacagccagaatctggcttacacctcagatcagggtggccgtccgcaggtgtataaagtgaatataaacggcggtgcgccgcagcgtatcacgtgggaaggttctcagaaccagaacgcggacgttagcgctgatggtaagttcctggcactggttagctccagcagtggaacccagcacatcgccaaacaggatctagaaacgggagccgttcaagtgttaacggacacgttcctggatgaaacgcctagtatcgcgcctaacggcaccatggttatctatagctcgactcaagggctaggttccgtgttacagctggtctcgactgatgggcgtttcaaagcgcgtcttccggcaactgatggacaggtaaaattccctgcctggtcgccgtatctgtgatgcatgtgtaaatacgtatgtatggcaaactataaaaaaggatcaaagagatgcaactgaacaaagtgctgaaagggctgatgttggcattgccagttctggctatcgctgcttgtagttctaacaaaagcgcaaacaatgaccaatctggcatgggcgctggcactggtacagaaagcagcaacctgtcttcagaagagcaagctcgtctgcagatgcaggaactgcaaaagaacaatatcgtttacttcggcttcgataaatacgatatcgcttctgacttcgctcaaatgctggatgcacatgctgcattcctgcgtagcaacccgtcttacaaagttgttgttgaaggccacgcggatgaacgcggcacgccagaatacaacatcgctttgggcgagcgtcgtgctaacgcagtgaaaatgtatctgcaaggcaaaggcgtttctgctgaccaaatctctatcgtatcttacggtaaagaaaaaccagcggtactgggccacgacgaagcagcattcgctaaaaaccgtcgtgcagttctggtttactaagagaatcgcatgaacagtaacttcagacgtcacctgttgagtctgtcgttactggttggcgtagcggtcccatgggccgctactgcccaagcgccaatcagtaatgtcggctccggctcggtagaagatcgagtcacatctttagagcgtatttctaacgctcacagccagctattgactcaactccaacaacaactgtccgattcgcagcgcgatatcgatagtttgcgtggtcagatccaagaaaaccaatatcagctaaatcaaattgtcgaacggcaaaaacagatctaccagcaaatggatagtctgggcgggcagggtgcgcaaaattctgcgtctgctgcagctggcgcgtcgacagagagtgcggcgacaggtggtggttctgattctgcggcgggtgcagcggctaatacagccgcaccggcaagcagtggtgatgagaacagcgactacaacacggcagtttcactggctcttgagaagaagcagtacgatcaggcgatcgttgcttttcaaaactttgtgaaacagtacccaaaatcgacttaccagcctaacgccaactactggttagggcagttgtattacaacaagggtaagaaagatgatgctgcgtattactacgctgttgttgtaaaaaattatccaaagtctccgaaaagtgcagatgcaatgtataaagttggggtgatcatgcaggaaaaaggccagggcgataaagccaaggcggtttaccagcaagtgatcaagcaattccctaacactgatacggcgaaacaagcgcagaagcgtttatctgctctttagtctttttaagcccagtaattggtctgatcggctaatttctgggcttgatcgtgtgaagaacaagcagttaaacgattgattcgaaatttaagttgcgctgcgaagaaaaattagtaatatatgccgccgttgccaagacaacttgcaaaacgttaaagcgacgaaaaaatagcttcatataatgggtcgttagctcagttggtagagcagttgacttttaatcaattggtcgcaggttcgaatcccgcacgacccaccatgatgaagtgatgtactgtttcaaatcgtagggatgagaaccgtgaaggttcgagccgaacgaagtgagacagcaacgcgaaggcgttgccccgtaagggtgagtccgcaggacgaatcatcccgcactttcaccattatgaagtgttaaaagtaaagtagttgagtagtaccgcatcacagcgggtcgttagctcagttggtagagcagttgacttttaatcaattggtcgcaggttcgaatcccgcacgacccaccattctttcctaattggctggaatgaaaagaagttgaagttatcgcagcgatattcctcttcctgttttgtctggttttattctctaagtgttgtaatgcaataatacataatgggtcgttagctcagttggtagagcagttgacttttaatcaattggtcgcaggttcgaatcccgcacgacccaccatgatgaagtgatgtactgtttcaaatcgtagggatgagaaccgtaaaggttcgagccgaacgaagtgagacagcaacgcgaaagcgttgacccgtaagggtgagtctgcaggacgaatcatcccgcactttcaccattatgaagtgttaagagtaaagtggttgagtagtaccgcatcacagcgggtcgttagctcagttggtagagcagttgacttttaatcaattggtcgcaggttcgaatcccgcacgacccaccatgatgaagtgatgtactgtttcaaatcgtagggatgagaaccgtgaaggttcgagccgaacgaagtgagacagcaacgcgaaagcgttgacccgtaagggtgagtccgcaggacgaatcatcccgcacgacccaccatgatgaagtgatgtactgtttcaaatcgtagggatgagaaccgtgaaggttcgagccgaacgaagtgagacagcaacgcgaaagcgttgacccgtaagggtgaatccgcttgacgaatcatcccgcacgacccagcattcccttctagttcagtcaactccccaaagaaagaacaatctcatactgtacgatttgtgtggtgcgataacacttcatgccagttttgaacaacgcttgcgttggcccgaagggcgagtatcaggatgatacgagtcacctgcgttcagattcgatccgtgagttgtgagtctgtgaaaatagtcaggcttaaaccttttatctcagctctgttattaatagcctccaaatcgtctctctatggcgctgtcagcgatcaaatacttcctttgccacctaagtctttttcatagactgcgccagatacgggctgctgtggctctttccattggatctaaacctggttgactcgtcgatcataattctaagctcggtaaaaccataaatagaaacgattcatctactatttttaactctattaaacatatttcgcatatatcaacaaattcgggcgactttcactcatgttttgggtattttgtttaggataaaaaacaaaatcccttattttatgtataacagcgtgagtaaccggtgtttttccatataccttgcgatgagatgtgagcgatgagcgaaatttttgatataaatgcggcgatttatcccttcccggcgaagccggcgcccttaaatctcgatgagaaggctttttatcgtcagaagatcaagatgttgctgaagcagcaggatgctgtattggtcgctcattactataccgatcctgagatccaatcgctggcggaagaaaccggtggttgtgtggccgactctttggagatggctcgcttcggcaacacgcatccggcttctacgctgctggttgccggggtgcgttttatgggtgaaacggcaaaaattcttaaccctgagaagcgggtattaatgcctactctcaacgccgagtgctctctggatttaggctgtccggccgatgaatttgctgcgttttgcgatagccatcctgatcgtaccgttgtggtgtacgccaacacttccgcagcggttaaggcgcgggcagactgggttgtgacatccagtatcgccgttgagctgattgaacatctggacagcttaggtgagaaaattatctgggctccggatcgtcatttaggccattacgtgcagaagaaaaccggtgcggacgtactctgctggcagggggcctgtatcgtccatgacgagtttaaaactcaggcgttgatgcagatgaaggcgctacacccggatgctgccattttggtgcatccggagtctcctcaggccatcgtcgatatggccgatgctgtgggttccaccagccagctaattcaggcggctaaaacgttaccgcagcaaaaactcatcgttgccaccgatcgcggtatcttttacaaaatgcagcaagtttgcccagagaaagaattattcgaagccccgacagccggtgaaggcgctacctgccgaacctgcgcccattgcccgtggatggcgatgaatggcctgcaggcgattgctgaaggacttgagcggggcggggcactgcacgagatacatgtggatgaagaattacgtcagcagtcgctgattccgcttaatcgcatgctggatttcgccaatcagctaaaattgcagacacagagtaatgcctgaattccttaatccttattattggcgagagctatgggttttcggaaatggttcgttaaagcaacggattgataaatataaagtttggcaagtctaaagaggccgcttcggcggttaactaaaaggattatcggatggactttttcagtacgggtaacatattggtgcatatcccgctgggcgtacagggatacgatttatcgtggattgaagccattggcactttatttggtttgctgtgtatttggttcgccagcaaagagaaaattattaactatctgtttggcctgattaacgtgacgttatttgccgtcattttcttccagattcagctgtacgccagcctgttgcttcaagtgttcttctttggtgccaatatttacggttggtatgcgtggagtcgtcagaccaccgataatcagatcgagctgaaaattcgctggctttcactgccaaaagcgttgggatggggcgctgtgtgcgtcatcggtattgcactgatgacattcaatattgatcgcgtctttgcctggctgacaggaataaccgtcgccattatgcaggcattcggagccaacgttcaggtgccgcatttggaaccggattctttcccgttctgggactcaaccatgatggtgttatccattgtggcaatgattctgatgacgcgaaaatacgtggaaaactggctggtttgggtggttatcgatctgattagcgtggtgatttttacctatcaaggcgtttacgtgatggcgctggaatacgtcatcctgacgttgattgccctgaatggctcgtggctgtggattaaagccgccagagagaatcattcgcaaccattagccgttcagagttaagtcagtatttacttttgatataaaggcctgacagcggcattgcggctgctgtcaggcacggatactaacgatttagtggtgatgatggtgagcgctagcggaagtcgcggcttgattaatatcgcagtctggttcttcacagtgctgatattccatctgaatcgtggcgtgcccaatctgatagtgatgcagtaaataatgctgaatgcgttgcagcaactcatcgtgatcgcgcggcggaatcacctgcacatgcaaggtcatcacccgttgttcaccgactttccatagatgcacatgatgaacgttacggacttcactaatattcaggcagagcgatttgcgtaatttatcgatatccacatcctgcggtgcgccttccagcaattcatgaaaactctctttcagcaggccccacgcgctgcgtaaaaccagcattgaaaccagcacggacaagatcgggtcgataggcatccagccggtggttaaaatcacaattgccgccacaattgccccgacagagcctaaaaagtcaccgataacgtgcagcatggcagcgcggacgttgatattttgctcctcgccatcgccgcgcaaaatccacagagaaaataagttggctaacagaccagcaacggcgacgatcagcattggcgtgcccatcacctcatgcggcgtaaagaaacggctagcggcttcccataaaataaataccacgatcagtaataacgcggctgcattgacaaaggcggctaccgtcgttaagcgcagatagccaaaggtatggttggcgtcaggtttacggcgagaaaagcgaaccgccatcagtgcgataaatagcgcggctgaatcagtcagcatatggccggcgtctgccaacagagccagtgaaccagatagccagccacctatcgcttccgcaaccataaatacggtcgtcacgataaaggcgataagtaggcgcttactgttactgtttttcggggagtttggagttgttgtcatcattcatcctggattttgacaaagcaatttacgacaaaacctagctgatactttgggttatcaaaaccatctgctgatggtttgctaagtgagtattgaagatatcttattcaacttatcaattgtttcatctagtatcttcaataactgagtataggtttcctcggtaatttttccttgctggcattgaataactacctgctgacacaattcagcctctggcgcgtgctgtaaaatcaggaagctgcctttagttctatgggcggctttctctatagtggaaagagaagcatctggctggctaagtagctgtttatcctggatgagggaatcgagcagcgtgctagtcagtttgtgcatcatctcactattttgatgcgccaatgattggagagttttctccagatcgctgaaatcggtcggtgcagcaagagtggtcgcttccacacgtaaaatattttcaatggcagccagagatatgggtttggtcagccagtgatcaatcgccacttttcccggcagaattcgggtgaattcttgcacatcggcagaacaaagaatgatttttgccggagcttgatcttgctgacgttcgatatagcggatgatttttgccagcgtaaaaccgtccggatgcggcatattgtaatcaataaacaataaatcaaagggttgctggcggtgggctttaaggaaatctcgaccattctcaaacaattctgacgacatacctaagtggtttagctgttgctgcataagcagtaaattggttggatggtcgtccacaaccgcgattcttaacggttgtagcgccgtcaatggcacctgcgattgctgtgacggcaggctaaccgccggttcttcctctgttagggtggcgggcaggctgatgtctacctgcgtaccctgaccgtataccgaggtcaagttaatctcgcctcccatacgttcaatgatttctttgcaaatggataaacctaaaccgctgccttgtaccgacaagcttttgctatttccagcgcgataaaatggctggaacaggtgaggcaggtctttggcggcgataccgcagccgctgtctttaacctgcaataatagtttgccgtgggtatctgtttgaggctgccactgaatattgacgttaatttctccgctttgggtgaatttaatcgcattggtaatcagattattgatcacctgaagcagtcggcctccatccaccaaaatcgcccccggtaaggactcactctggctgacagcgaagctaattgggcgcattcccaaaagcggttgataaacggcgcggatatgcccgatccacggttccagtggcgtcggtttaggattcagttgcaggctgccggtttcgagcttggcgtaatcctgtaagtcattgagcaagctcaataaggatgaggccgaactgtatatcaccggtaagttatccttctgatgattagcctgctttaactccagctccagcaaccccagaatagcgtgcatcggcgtgcgtaattcgtggctaatcatcgccagaaaacgacttttcttactattggcggcctctgcctcgcggcgcgcctgttccaaccaattccgctcccgttgctcttttcgctgctgaatgaaacgtcgtagcaatacaaagagtaacccggcaataatcagccccagtaaggttagcaaccaaccggtttgcggtatcatgcgattatcattcaccgcatctatcaaactgctgcgatccgaggtccagccttcgcgcagcgattgcagagtggctggcggaatttgcagcagatttttattgagaatagacagcaatagtggcgtgtcacggcgcacgccaaacgcaatgggataagcgatgttgttagcggcaaaggccagttttatcgcgccggcatagcgagataggacaataaagttggcggaaattacgttatcaatcaatgcatcgacctgaccattcgccagagcattgtaaagggctttactgttctcaaaactgactacgctaaaaccgtcgggaatcaggtgttgccccagatttccattcactacgccaatactcttcccctctaaatccttccaggtagaaatattgttagcgtattcgcttacataaacgccccacaaagcccgatgaatgggagtggtgctgtcgtattgttctttaaaaccccgggttaatggcaatacggctcggaataatgcctgtttatcgctgacctgctggtctgcctgttgcgggttgctgctccagaccggagcgaattccagcccggtattttgagctatgatattaataatatcaacgatataaccatgaggctcgtcgtcagaacctcgatagctgaaagggtagtcattttcgattgcggcatagtaaatccgcggatttttcttcacccattcctgttccaactgcgaaaggtcggcgttgccggtatccagatagctgggaatttttttgctccagcgattctgaataacattggccatcgacatgggcaaattgctgataacctgatcgagcatctcaattaacggtttatcggtagaggcaaaaacaaaggataaattgcctaatttaatcgcgctttcaacctgatagatctgcccgagctgtagctgatcgataataaaactggcgctggtttcatcggcaataaagtaatcattggtgccatttaataatgagtaaaccgcctgtaaattactgtcgaataagcgtacgttggccgtctggctatttatttcgtcataagcctgcataccggtaattttgctgatggcaattcgggcattttccgagttcagcataatggaacggttattttgccggttgcgcagtacgcgtaaattactgacgtaataaggggcagaagagaacaggttaggcgtaaaggcattttgcggtatgccaaatagcaggtcgatctgtttgtttttaattgccagattgagctgcgccagatcggtaaagccgtaaatggcaatatgggcaccggtggcttgatgaatatagtttagatagtcggcgttcaggccatagagatcgtcatcaacgataatattgtaggggctgaggttatcgctcaaaatccccacacgcagggttttgccgtgccagtcattcttcagcgtagcaaaggtctgatcggtggggacgttgatgctactaaccagattatagcgtaccggttcggcggcaatcgctcccgtaggcaggcagaactgaataagggtcaggagcaaccaaatgaatttcatggctgtagatcgttaaatacggcaattaattcaagaagattcgccgccccagttttattcaaaatattctttttatgcgtactgacggttttattactgatgtttaacatttgcgcaatatgcaaattggagttccctttcgctaataggcccaatatctggatttcttttggcgtgagattatgtttttcataattatctgccgaggtaacaaaagaaatttcttccgggaaagcggtattacctgcgagtacctggcctatggcatctaacaggtgagtcatctggctacctttgtgcacaaatccttgagcaccggcgctgtgagccattttagcgtatacctctgtctcttgcgaggtatagacgatcaccggaagctcggggtaatggcgtcgaattctgcgcaggaattgcaggccgtctacttgcggtaagccgatgtcgaggatcagcaattcaaaaggctgttcggctagacgctggactgcctgctggtcgtcggagacactttgcaattgataaggaatggccgattgaagcagcgcggcttcaagggcgacgtgtacaacgggatggtcatcaactaagagcagccttggcatagtgtccttttatcctctgatatatatatcatcccaaataataactttgctaaattcattatgagtgagataagtacagacgaatagggaaatatttataattgttaataaaataactaattaaaataagtatatttcctatagatagcaaacaaataagtatcaatgtttctgatcggtagatacaggttatttttagccgcatatgcgcctggcggagggctggatttagggactgaacctaagtggtatacctaaagcgataaagtagatttacagcgttccattgacaggctagattggttgaaacctcaaatatgcaatgattgtcataagactgaatggaagagctatgaattaccagaatgatgatttacggattaatgaaattaaggaactcctgccccctgttgcgctgttagaaaagttcccagccagcactcgcgcggcagaaaccgtcgctcaggcccgcaatgcgattcatcacattctgcgtggtgcggacgatcgtctgctggtggttatcggcccttgttcaattcatgacactgaagcagcaaaagaatatgctgcgcgcttgctgaaactgcgggaagaactgagcggtgagttggaagtggttatgcgcgtgtattttgaaaaaccgcgtaccaccgtgggctggaaaggcctgattaacgatccgcacatggataacagctacgatatcaatgaaggcctgcgtctggcgcgtaaactgctgttggatatcaatgacagtggattaccagctgccggtgagtttctggatatgattacgccgcagtatctggctgatttgatgagctggggcgctataggcgcgcgaactaccgaatctcaggtgcatcgcgagctggcttctggcctgtcttgtccggttggtttcaaaaatggcaccgatggcaccattaaagtggcgattgatgcgatcaatgccgcgggtgcacctcactgcttcctgtctgtgacgaaatggggccactccgcaatcgttaacactgccggtaacagcgattgccatatcatcctgcgcggtggtaaagagccaaattacagcgctgcgcacgtgagtgcggtgaaagaagggctgaataaggccaatctggcagcgcaaatcatgattgattttagccatgccaacagcagcaaacaattcaagaaacaaatggaagttggcaccgacgtatgtcgtcaggtagctgagggcgaaaaagcgattatgggcgtgatgatcgaaagccatttggtggaaggtaatcagagtctggaaagcggtgagccgctggtctatggcaaaagtatcaccgatgcctgtattggttgggaagatactgaagttctgctaaaacagttggcaaacgcggtgaaagcccgtcgcgactaacaaattgacgtagaaatagtgggtatcagtgagtaccgagaataaaaaccccgccggagcggggttttttatggatgaaattcatccggcgaattacttcgctttaccttggttagccacggcagctgctttcgctgcgatttcgtcggcattgcccagatagtaacgtttgattggcttcagattttcgtcaaattcataaaccaacggcacgccagttgggatattcagctcaagaatttcatcttcgctcaaatcgtccagatatttaaccagcgcacgtagagagttaccgtgagcagcaacaataacgcgctcaccgctagcgatgcgcggtttgatttcttcgttccaataaggaataacgcgttcgatggtcagtgccagactctcggtcgttggcagctctttgtcagacagttttgcgtaacgcggatcgtgtcctgggaaacgttcgtcttctttgctcaactctggcggagtgatggcaaagccacgacgccattgtttaacctgctcgtcaccgtattttgcagcggtttcagctttgttcaggccttgcagcgcgccgtaatgacgttcattcagtttccaggatttttcggtaggcaaccaagcctggtccagttcatccagaatgctccacagggtgtggatagcgcgtttcagtacggaggtgtaagcgaagtcaaacgtgaagccttcgtcttttaacagcttacctgccgcttttgcttcggtacggcctttttctgacagatcaacgtcataccagccagtgaagcggttttcgttgttccactgactttcgccgtgacgtaccagaaccagctttgttactgccatagttcgaactcctcagatgtctaacttattcaatgataactattatcattatattgcgggattactgcgaacagcaatcgattgtgtttaaccatagccaattttttgccgcaaagtaagactctttgccgaatcgattcgtctataagtctatgcagcgaacaaacggggtactaaacataccccgcagcgccacatctagcaatgaaactggattacgcagcttttttcaggcaggtgctcatgaaggttttgcgactatcgcctttcagatctttggttttggcttcggcgttacaggatttcattttttcctgctgcggtgtcattgccgccggtgccactggtgcaccggctttcaggcaggtgctcatgaatttcttacggtcgtcacctttcagcgccttgctggtggcttcgtggttacagtcagtcatttttttctgctgtgccagttgagccggagaaggcgtttttgccgtatcggcagccattacgtttgcgctgagcaaaagccccgcggataacaaccacaatgtagtcaggcgcataacatttccttttggttcagtaagcagaatgaatatcgatccgtcgcgagccattaacacaggctgatttcacgatgagagatagctacctcaaatcatggagttgcctgttattggctttacggatgactctaagcgtagtcggcgtcgttgaggaagggtaggaacgggcgaaaaatcagttatatcttatgccagaaggcggggtggaaggaaagaaaactctccgtaaacaatatgttacggagaatgtgtggtcgtgaatactttattttaaaggtattacagcgccgtaaattgataaaccgtggtcgcgcggtagcgtttgtccggagtgacccaacagtcgggctgtggccattccggatgattagggctatcgggtaaaaatccactttccagcgctatacctgcataattagcgtaagttccgccgagtcgagccggtgttccattcaggaaattaccgctatacagctgtattgccggtgcggaggtaaatacgctcattttgactttgccatcggctgaccatacatgagccgcagggctgtcgattgcgccgcaggttcggtggagcaaataggcgtgatcgtagcctttaacccgttgttggcagggatctttgaggaaatcctgtgctagcgtttttggctggcgaaaatccataccgctgtgttctacgctggctaaaggttccgccggaaggcctgtagtgtccaccggcaggtaacgatcggcgaaaagttgcagccgatgttgtcgtgcgtcgcgacttttaccatccagattgaaataggcgtggttggtcagattaattgggcaaggctggtcgaccgaggcctgataatcaatttccagccgattgtcatcggttaaccgatagtgagtttcgacgatcaaattgccaggaaaaccctgatcgccatcaggggaatgcaattgataacaaacctgacgtttatcctgatgaataatctgccagcgccgggcgtggaacccttccggcccgccgtgtaactggtttggaccactgttggcgaccagaggaaaaacctgtccgttacgctgcaattgagcctgagcaatgcggttggcgtagcggcccacggtggcacccaaataggcaccttgccgcgggtaatcttccggattcgggcagcctagcagcaattcacgtcggcccccatcgttaagcggaaaaacagccgaaagccaggttgcgccccagtccatcaggctcaccgacatgcctgatttgttgcgtaattcggttaactggaacggctggccgtccggcgctaatgcatttttcagcatattccggctcctgccgaagcctgacaaacatagaatgtttcccgcataccgccggttttttgcggatattccagagcgacggtcgcacgtacttgctcgactaaatcctgaggcatcagcgcgacaatgcagccgccgaagccgcctccggtcatacggacaccacctcgctcaccaatgacagatttcacaatatcgaccaacgtatcaatggctggcacggtaatttcgaaatcatcacgcatggagatatgagactcctgcattagctggcccattaatgtcagatcgccaagagccagagcatcggcggcagcctgcgtgcgcgcattctcactaataatatggcgtgcgcgtttggcaactatcggttccatttcgctctgattggcccggaactgtgccggagtgacgtcgcgcagggcttttacaccaaagaagcgagcggcagcttcgcattgttggcgacgagtgttgtactcgctatcgaccagaccccgctttacattggaattgattatgactacggcgacgttttttggcatagcaaccgggcgggtttccagcgagcggcagtcgatcagcaacgcctgatcctgcttgcccaatgccgagattaattgatccataatgccgcagttacaaccgacaaactggttttctgcttcctgaccgttgagcgccagttccacgccgctgagcgggagctgatagagtgcctggaatgcctgacctaccgcgacttccaacgatgcagaggaacttaaaccggcaccttgaggcacattgccgctgatcgccagatcggcaccgccaaaatcacggtttcgcagcaacagatgtttcaccacgccgcgcacgtagttggcccagcgcagttcagggtggctaacgataggttcatcgagagaaaatatatcttgctggttatcataatctgcggcaatcacacgaatctgtcgatcatcacgtttcgccatgctaataaccgtggcgtaatcgatcgcgcagggcagcacgaatccgtcattgtaatccgtgtgttcgccaatcaagttgacccgaccgggtgcctgaatggtcagggcgggttctttggtaaaaaattggctaaaaacggcctgggtatgttgttttaaagacattattgaactccagcttctcgataatgaacatcactgactgcccgcaggtgctcagccgcctgttcagccgtaagatcgcgctggctttccgccaacatttcgtaacccaccataaattttcgcaccgtagctgaacgcagcagcggcggataaaaatgtgcatgtaattgccagtggcgattgtctgtatcgttgtagggcgccccgtgccaacccatggaatagggaaaggagcaggagaataaattatcgtagcggctggtcagttttttcagcgccagtgccaagtcggtctgctgttccgaggtgagctcatcgatccgcatgacctgggctttaggtagcagtaaagtttcataaggccaggcggcccaataaggcacgacggccagccagtgctcggtttctaccacggttcggctgccgtcggcggcttcccgacggacgtaatccagtaacagtggcgatgaatgctgttcaaaatagtttttttgcagccgatcttctcgttcggcctcgttgggcaggaaactgttggcccagatttgaccatgggggtgcgggttagagcagcccatcgccgcgcctttattctcaaaaacctggacccacggataggattggcctaattccgcgctttgctcctgccagcttttcaccacgccggccagttcaggcagagaaagtaacggcagggatttactgtgatcgggggagaaacaaaccacccgactggtaccgcgcgcgctttggcagcgaatcagaggatcggcggtttccggcgcatcgggtgtatccggcatcaatgcggcgaaatcattggtaaatacataagtgccggaataattcgggttcgcatcaccggtcacccgtaaattacccggacacaaaaaacaatcaggatcgtgagcgggctgttctcccgtggtcaatggttcttgctgcccttgccacgggcgcttggcccgatggggagaaacgagaatccattgatcgctcaatggattatagcgacggtgtggatgatccacgggattaaagccagtcatttttcttccttaatcaggataaccttgaggattttgtgattgccagcgccaggtatcgatagccatttcgtccagtgagcgctgtacgcgccaatccagatcctcggcagctttggttgggtctgcccaataagcggcaaggtcgccttcgcgacgtggagcaaaatggtacgtcagctgtctaccgcaggctttgctgaaggcattcaccacgtccagcacgctgtggccgcgaccgccaccgaggttataaatatgtactccagctcggttgtggcattttttcagtgctgcaacgtgaccatcggctaaatctacaacgtgaatataatctcgcacagcggtgccatcggcggtgggatagtcattgccgaaaacggccagagaatcgcgtcggccgacggcgacctgcgcaataaacggcattagattattgggtacaccctgcggatcttcgcccatcagcccggacggatgggcgccaaccggattgaaatagcgcaaaatagtcatgttccatgcggcatcggcacgctggaggtcttgcagaatattttcgaccatcagtttgcttttgccgtagggactagagggaatgcccgtggggaagctttcgacataagggatcttgggttgatcgccgtaaaccgtggcggaggagctgaaaataaagtttttaaccccggctgcagccatagcttccagcaataccagcgtgccgcagacgttattatcgtagtaggccaagggtttatttaccgattcgccgacggcttttaaaccggcaaagtgaatcactgaaccgatagtatgctggctaaagatatgatccagtagtgcgcggtcgcgaaggtcaccctgataaaacagtggcgattgccccgttaattgatggatgcgttttaatacgctggatttgctgttgcataggttgtcgataacgattggcgtatagcccgcttcaattagctgcacacaagtgtggctgcctatgtaaccgctaccacctgtcactaaaacatacatacaaagctcctgaatcgtacttatgagatgaagataccacgccaataacggtaaaaaagtgatctaacatcaaaaatggaatcgtttacactcatattcaataaggcattgaacagcaggcatacagtcagtctgaagggcataagaggggaggaataagtgtagcattatggtaacgctttcatccacctaaccgacaggaatgtcctgccggttgatgaattcagtgtggcagatctgcctagtgatgcagtgccaacgggtaggtaaagaacagcagatgagtcagattcagcgcgaaatggaaggcaacggcgatccacaggcggccactccacatccatgccagaccgtaaatcacgccggctagcgctgcgaagaccatcaacagggggcctccgggataatgcgctgcaccaaatagtaatgaagcaataatcagagcgggaaatgcaccaagccactggcttaaacgctgttgcaggtagcagcggaacagcgcttcttcaaccagacagacaaagaacaggttgccgataacaaaagtaccgagccattctggcgtgtgcagttcgattttcaggccgcctaaacccactgccagcagcaacagtgctggaacagccagcaccaatacagcccaaccgactttccctacggaaggatgttttttagcaacaaataagcccggcaagcagcttaacagaacaaagggaatcagagctttgtccagattgtaatacattgagaacggggcgctgagtggcccgatctgcactttatccagtactttcagattgttgaaacccggaatgtaatggaagaacagcgccacagaagccgctaccaatagcaactctaatccgccagccagccaggttatctggcggtatttttgcaatgctaacgaggcgagcagaattaacaacagtgcggtgatggccggtaaggtcagtacgccggtcgcagtggcaatacctaaagtaatagccaaaagtaacagggcgatgatccggttaaatggcaaaaagagtaacgaagcagcaagaacgccccacatagactagtccctttatgtgttgaatttagtgatagattcagcgccgatagccctggcactgaatgtaaatccgatcgatgtctatcgatcggcataaataataacataatgaaatggattaaaaggtcgggtcagttgtcgacaagccgatttgccagtccgaactgcgccaattgcccttaaggtaacgctctaatcaggtagttggctaaactggtagcgataaatatcgccgtcggcaataaaacttaaacgatgagttatgcactctggcgcgtcttcagcgtgatgagagacaaataacagctgggtttctccttcgccaatcatgacatcaataaaacgccgcactaacaaacggttcagcggatccagcccttgcaacggttcatctaatatcaacagtgccggatgttttaccaaagatctggcaatcagcgccagccgttgctgtccccatgacagactgtgaaacggctggtcagctgccgcgccggacaaaccgagcaacgccaaccatttatctgccaactgccgctgtcgatcggaaactgtctgataaataccaatggaatcaaagaaaccggaaataatcacattacgcaggctggcgctgacgcgataatccaaatgcaggctgctgctgacataaccgatatggcgtttgatatcccagatggtttccccgctgccgcgacgacgaccaaatagcgtcagatcattactgtagccctgcggatggtcgccggtaatcaggctcagtagcgtggattttcccgctccgtttgggccaataatctgccagtgctcgccgcgatttacctgccagctcagattgtgcaaaatgggacggtcgttgtactccaccacgccatttcgcagaataattaacggattatctactgctaatgaaggttgttgctgcgggtcttctgcttccggcagggatagtccatccaagttttcactgtgagccagttgggcgactagggcttcggctaaaacctgcttacgttcacctaaactgactaaatggcaatcggccaatactcccactttttgaataaaatcaggaatatcatcgaatcggttgagcactaatatcagcgtcacgccttcagcggacagttccgccagatgtcgcgccagctgttctctagcggcgacatccaatccgtcaaaaggctcatccagcactaacatatcaggctgcggcatcagagcctgacagagcagggctttgcgggtttctccggtagaaaggtatttaaagcggcgagataacaaatgaccgataccaaactgctgcgctaaccgctggcagcgctgcgggttggtgacctgatcctgaataatttccgcggtggtacggccggtatcgtcttcatcctgactgagcatatcggtattgttgcgttgccattcttcgctgactaactgctgaagttgctcgaacgataaacgcacaatatgccgaaaatcgctgctgcgactgccggtcaggagaattaactcatcggagagcgctctggctaacgctgatttaccgctgccgttagcgccgacaaaggcccagctatcaccagagtgaatatgcagatctggaagattcagcgttcggatatcgcttaaacgaaaacaaccttgcgctatatgcaactctgacatcattcctcccattttccgcaacgtatttacgttaagggataagcggattagtggggaaagtcaaatgacaaatctgcacgactgcgccggtaacgcagcgtacagataaggaaactgtgctaacaaagcgtggcgataatgactcgatcggcgttgaactgggcgataacttgcgcgccattatgtagattcagtttatgtaactcttgattggataaggtggcgcacaaactggctccgccgtgaagggtaacaatcacttcactgtagtcgcttcctggctctatgctggcgacgatgccgggcaatgagttgtctgctgctcctgccagcgctggatcggtggctaatttcacccaaggggccttaatcagcgccagcacctctttgcctgttgccagttgcaggcgatcggcgctttgttgagtgacagcggcggaaagacgagtttttccatctgccaggagaatattgatgtgttgctgaacctgatgatgatcccgctcagtgaccgtgccaaagaactgattgcgggcgctggtttgtaaggagaagcgggagattgctgctagcaggctgtccagcggcagtgaatcatctttcaaggtatcgaaagctttttgctgaatttgctcgagtaattcgtaaagttgaatcaagcgttcgccatagcgggttaaacgcgcgccgccaccgcctttccctccggttgcgcgatccaccagcgtttcttcggccagagtattcatttcattgatggcatcccaggcacttttatagctaatgcccgccagcttggctccttgactgatggaacctgtcaacctgacctgcttgagtagggcgatgcggcgcgggtcagcaaaaagacgctgctgaagctttagcgtaagaagaatttcggcttgcatggtcattttggctccggcagtaaaagcgccattgtgaccgattggcgtgcgggggcgcaaatcgcacttttggctggttacatttttttgtcagttgctaaaataatagggcttattcacttcaaatatggtttaaagtgaattattgaaagtggtgtagtataccgctcaacgagcagttaaatgaggctaccatcgtggaattattgaaaagtttggtctttgccgtggttatggtaccggtggtaatggccgttatcctggggctgatttatggtttaggtgaggtgtttaacgtcatctccaaaacaggccacggtaaagaacggggctaatgacatgctccttctgcgttgagtttttcttcgcagcgacctgaaattcaagaatgcccggttgatttccccaattggtttagctgttgcacaagttgcggccgttaaacgaaagggtttcaaccgggcgttttcgtttctgttatcccacgttatttctgccattatttctgtcctatcgctaacaactcaagatctgtcacagcttgccgataaactgcatgaccctgttatttgcttacgttatattgttcattacataacgatatattcactcggagcagaaaatgaaaaaacaatggggtaaatgggcactaggcgcggttgtggctgcaactttatctgggcaagccgcggcggctgaaaatatcaccgtcttcgctgccgcttctctgaccaatgcgctacaggacatttccagtcagtatcataaagagaaagatgtcgacgtggtggcttcttatgcctcttcatctacgttggcccgccagattgagcagggcgcgcccgccgatctgtttatctctgccgatcagcagtggatggattatgccattgataaaaagcaaattgttgataatacccgctacactttgctcggtaataaattggtgctgattgcgccaaaagacagcaaaattgataaagtctccatcgataaacaaaccgaatggaaaaaactgttagacggcggtcgtctggccgtgggcgatccggatcatgtacccgctgggatttatgcaaaagaagcattggaatatttaggtgcctggacaactctctctccggaaatggctcgtgctaacaacgtgcgtagcgcgatggcactggttgagcgcgcagaagcgcctttgggtattgtttacggctctgacgccatagccagtaacaaagtgaaagttgtgggtgtattcccggagcaaagtcataagccggttgaatacccaatggcaattgtcaaaggccatgagaacgccacggttagcgctttttatgattatctgaaaggcccagaagcggcggctgttttcaaacgttatggatttaccccacgctaatgatattgagtgagtatgaatggcaggcgatagtgcttagcctgaaagtttcgggcgtcgcggtcgcctgtagtctgccgttaggcattctgatggcatggattctagtccgctgccgtttccccggtaaatcattgttagacagtattattcatttgccactggtgctgccgccggtggtcattggctatttattgctgatcagtatggggcgacgcggtgtaataggcgaatggctatatagctggtttgggattaatttcagctttagctggcgcggagcggcactggcctcggcggtggttgccttcccgctgatggtgcgagccattcggctggcgttggaagcggtggatacccgattggagctggccgcccgtacgttaggtgccaatccgtggcgggtgtttttcactataactctgccactttccctacccggtgtgattgccggtacggtgctggcatttgctcgttcactgggggaattcggcgccactatcacctttgtatccaatattccagggcaaacccgaactatcccgctggccatgtataccttgatcgaaacaccgggtgccgaagcggctgcggcgcggctgtgcgtgatcgctattttgctgtcgctggtttcgctgttgctctccgaatggttagcgcgttggggtaaaaaacgcatgggggccgcatgttagtactggattttagccagcaactgggcgacctgaatctgcaggtcaacgccgaactgcctgcgcagggcattacggccatttttgggctgtccggcgcggggaaaacctcgctgattaacgtggtgggtgggttaagcaagccgcagcaaggccgggttgtgctgaacggtcgggtgttggtggatgcggaaaaacagatctatttaccaccagagaaacgtaaagtcggttatgtgtttcaggatgcacgcctattcccgcattatcgggtacgcggtaatttgcaatacggcatggcggcatcgatgcgttcccagttcgacaccatcgtgaatctattgggaatcgcgccgttattatcccgctttcccatgacgttatccggcggtgaaaaacagcgggtagcgattggccgcgctttgctgactgcgccggagttgctgttgatggatgagcctttagcctcgctggatttaccgcgcaagcgcgagttactgccttatctggagcgtttggctcatgacgtcaatattcccattctgtacgtcagccatagcatggatgagattttgcggctggcggatcgggtggtggtcatggatgcaggaaaagtgcgcgcagtcggcggtttagaggaagtctgggccagtagcgctttgcgcccttggctacagcgagaagaaccgagcagcattctgcgagtggcggtgattggccatcatgaacgttacgctatgaccgcgctggcgttgggcgatcagcgtttgtgggtaggtcatgtggacgccgagctggacagtatgctgcggattaaaatcaacgctgccgatgtgtctttggtgttacaaccgtcgcataacagcagtattcgcaatattattccggcgaaagtggcggaatgtctggacgtagacggtcaggttgacgtgaagctagcgatcggggaacagtggctatgggcgcgaattactccgtgggcgcgcgatgaactggcgctaaaaccgggtcaatgggtgtacgctcagatcaaaagcgtttcgtttaaccgcaaaggggaatgacgggaagtttgttgcccgcgcgcgattttcctcaggtctttatcagcgaaaaggctccataagtggagccttttgatgaatcaattctggatttccgaactcatcacgctaatacatgctgacgaatggcggcggcgatacccggctgctcgttatccgcgatcaccagatcggcacgctgtttaatggcatcggcgctgttacccattgccacgcccaaaccggcggcttccagcatactcaaatcgttaaagttatcgccgaaggcaatgacttccttcatgctcattccttgagattcaacccactgctgcagacgcttgcctttactattgcctgcctgtgcaacatccacctgatcgtgccacgaccattcgcaagccagacccaattcgtcttccaccatagtggcgaaggcttgcagtttgttggtatcggcgtgggatgtggcgaatttccagatggaactggcgctgcgagccgcgtcgtgcaggctattcacatgtacgatcgccggacgctgatgttcaggtaaatttccggcccagttaatcgagcggctaacgtggccgttaagatgttgatacagcatggcgtcatccacgtacatcaggccatgaatctcggcgtgatccagtagctgaattacctgaaccgcctgttgagctgatagcggatcggaagctaatacctgcttcgcctgataatcgtagagataggttccgttgcagcaaatggctggcgtatctagcgctaaagcctgataaaacgggtgaatcgccacgtgatgacggccggtcaccaccaccactttcactccggcggcgcgggcttcagccaatgctgacagcgattctggcaggatacgtttctggtgatctaatagggtgccgtccaaatccagagcaattacgcgataggtcatagcggtctcatcatttattcgattattaatacacattgaaccgatgttacaccggataggtgagggattaaactgaacagattgattccctgaccattatggcgagagcgcgcgcaggtgccgcagcagggcaggtaagccgtggtattggcagacaatcgttagttggcctgagtgattattctgctaaaacgagagctattttgcccaaaacgttgttctgctgctgaaagttgttatgccagcccagtcaggtaagctaggattcagttagccgcgtcacggcaataatttgactagcatgcatgattaaggagtagcgatgaatcaagtggtttatgtggcaagcccagacagccagcagatccacgtctggcaattggatacggcaggggctttaacgctgctgcaaaccgttgacgtaccggggcaggtacagccaatggcgataagccccgaccagcgccatttgtacgtgggtgtgcggcctgattttggcattgtcacttatcgcattgctgctgatggtcaattgcaggaagtgagtatggcaccgttacccggtagcccgacgcatattttaaccgacttacaaggtcgttttctgttctcggcgtcctacagtttcaactgcgttagcgtcagccctattgatgaacacggccatgtgcaagcaccgattcaacaaatcgatggcttgaccgcgccgcattcagccaatatcgatcctactaaccaaattctgttagtcccttgcctgaaagaagaccgcatccgtctgttcgatctgagcttaaacggtaaattgaccccacacgatcaggtgggcgtttccactgcagcgggcgctggcccacgtcatatggcattccaccctaaccataaagtggcttactgtgtaaatgagctaaacggtacggttgatgtgttccagatcgaagataacggtcagcaataccgaatagttcagacgctggatgcgatgccagccgattttgctgagactcgctgggcggcagatattcatatcacgccggatggccgttatttatatatcagcgaccgcaccgccagcctgctgggtattttcagcgtttctgaaagtggcaacgtgatttctctggtaggtcatcatctgacggaagcgcagcctcgcggctttaatatcgataatagtggccagttcctgattgcgtccggtcaaaaatccgatcatatcgaagtgtatcggattgacccggcaacgggtcagttgacgacgcaggggcgctatccggtgggtaaaggtccgatgtgggtgagtattctggctcctaaacatggataatccatttttagatttcagtctgttatcagtgagataacgggttgaggaacaaataataaagcagcgctctgtaaaccggtcgctgcttttttaatgccaataaaccggcttattctgcgacggccgcggtaatcgcctgggtcagacgggtgagctgttccggctgaataatatacggcggcatcaggtaaatcagtttgccaaagggccgaatccatacgccccgttcgacaaagccgcgctgcaaagatgccacatttaccgcgttttccatttcgaccacgcctatcgctcctagcactcgtacatcggcaacgccaggcatcgcggccagcggcactaattcacgctgtaattgtgtttcgatgctttgcacctgctgttgccagtggttgcccgccaacaaagccagattcgccaccgccacggcgcaggccagcggattacccataaaggttggcccatgcataaagcaaccggcatcaccattactgatggtttcagcgacttgacgggtggttaacgtagcggaaagcgtcatatagccaccggtgagggctttgccgagacaaagaatatccggcacgatttccgcgtgttcgcaggcaaagagcttgccggtgcgcccaaagccggtggcgatttcgtcagcaatcagcagaatattgtatcgatcgcacaacgctctaacttcacgcaaataagctggatgataaatccgcattccgccggcgccctgcacgatgggttcgagaataacggcggcaatttcgccgtgatgctgctcgattttttcggcaaaatcgtgaatatcgtctggattccactcttcatcaaaacggcactgcggtgcgtcggcaaacagatgattagccagataaccctcatataggctatgcattgagttttgcggatcgcacactgacatcgcgccaaaagtatcgccgtgataactgtggcgcagcgtcaaaatgcgctgacgcttctctcctttggcctgccaatattgcaacgccatcttcaaggccacttctactgccaccgagcctgaatcggctaaaaatacgcattccagcgtattgggagtcatggcgaccaattgtctgcacagcgcaacggccgccggatgagtaatgccgccgaacatcacatgagacattttccccagttgctcagtaaccgcctgatttaacacgggatggttataaccctgtatggcagcccaccacgacgacatgccatcaataagcagtcggccatcggatagttgtagctcgacgccgctggcagaaactaccggataacacggcagcggctgagtcattgaggtgtaaggatgccagatgtggcgctggtcaaaggcaaggtcagaaggtgtcataaggatctgttgtaaactaaattaaccatggaatggttgacagtatatcgagtttacataaactgacgagacttttctcattctttggagatgccaatatggcagatcgcattcactggacagtagggcaagcccaggccctgtttgataaaccgctgttagagttattgtttgaagctcaacaaattcatcgtcagcattttgatccgcgtcagattcaggtcagcactttgttgtcgattaaaaccggtgcctgtccggaggactgtaaatattgcccgcaaagctcccgttataaaaccggtttggaaagtgagcgtttaatgcaggttgagcaagtgctggaatcggcaaagaaagccaaagccgccggttcaacgcgcttttgtatgggggccgcgtggaaaaatccccatgagagggacatgccgtatctcgagcaaatggtgcagggcgtgaaggcgatgggaatggaaacctgtatgaccttgggaacgctggataaaagtcaggcgcaccgtctggcggatgcggggctggattactacaaccacaatctggatacctcgccggagttttacggcagcatcatcactacccgtagctatcaagaacgtttggatacgctgggggaagtgcgtgacgcggggattaaagtctgttccggcggcattgtcggtctgggtgaaagcattaaagatcgagccggattattggtgcagttggcaaacttgcctaagccgccggaaagcgtgccgatcaatatgctggtgaaagtcaaaggcacgccgatggaaaataacgaagacgtggatgcttttgattttattcgcactattgccgttgcacgtatcatgatgccgtcctcttacgtgcgcctgtccgcaggtcgtgaacaaatgagcgagcaaacccaggcgatgtgctttatggccggagccaactcgattttctacggttgcaagctgttaactacgccaaatccggatgaagacaaagacttacagctattccgcaagctgggcttgaatccgcagcaaacgtctactgagcacggcgatcgtcagcaacagcaggtgctgactgaccgcatcaaatacagcgatacgccacagttttataatgcggcggtctgatgagttggcagcataagatcgatcaaagcttgcagcagcggttagcgcaggccgcctaccggcgccgtcaggtgaatcagggttccactgggcgctttctgcgggtggaaaatcgccaatatttgaatttttccgggaatgattatctgggattaagtcaggatgcgacggtgattgccgcttggcagcagggcgccgctcgctatggcgtcggcagtggcggttccgggcatgtcacgggctacacgcaggcgcacgccgatctggaacaacaacttgccgattggctggggtgtcctcgcgcgttgttatttatttccggttatgccgccaatcaggcgctgctagcggctttaaccgccgcagatgatcgggtattggccgatcgccttagccacgcttccttactggaagcggcggcgagttcaccggctcagcttcgccgctttcagcataatcagccagaatccctgcaaaatctgctgaataaaccttgctccggccaaacgttggtggtgaccgaaggggtatttagtatggatggcgacagtgcaccgctggcggatttgcaccaacgcgcgtcggcggcgggagcctggctattggtagatgacgcccacggcattggtgtcagaggtgatgaaggacgcggcagttgctggcagcaaggggtaaaacctgagttgcaggtcgtgacttttggtaaagcttttgggctgagcggtgccgctgtgttgtgttcgcagccggtcgccgagtatttgctgcaatttgcccgccatctgatttacagcacttccatgccgcctgcgcaggcttatgccttgcagacggcgctaaaacgcattcaacatggtgatgatttacgccagcgtctacagcagaatctacggcagttccgtcagggcgcggccagcttgccattgcagttaactgcgtcagataccgccattcagccgttaattgtcggtgataatcagcaaaccctctctttggcgcagcgcttgcgggatgaagggctttgggtgaccgccattcgtccaccgaccgttcctcccggcggcgctcgtctgcgtattaccttgaccgccgctcatcagccggctgatatcgaaagattactggaggtgctacatgccacttgccattgatactgtgaataaacaggcgatagccagcgcctttagccgtgcggcaggtagctacgatggtgcggccgctttacagcgcgaaaccggtgaaattctgctggcattgggtcaacggcacccgggtactcaggtgctggacgcgggctgtggcaccggttatttcagccgtcgttggcgggatctgggcaaaaaagtggccgcattagacctggctcccggcatgctggagtttgccagacagcagcaggccgccgatgaatacttgttaggcgacattgaacatattcctttgtcgaatgagtcggtggatatttgtttcagcaatctggcggtgcaatggtgcggcaatttgcgcgccgcgctaaacgagctgtatcgggtcactcagcccggcggcataattttattttcgactttggccgcgagttctcttgatgaattagggcaagcctggcagcaggttgatggccagcgccatgtgaacgaatttctgccgttggatgatataacggccgcctgcggtggttttcgttatcaaataacgcaacgtattcatcatcagtatttcaacgatcttatcgagctaatgcgctccttgcagggaattggcgccacccatttgcatcaggggcgagctaatgggttgaccgggcgacgtcgactggcggcgctacaggcggcttatcctcagcaaaatggtatttatccgctgagttaccaattggtttatggagtgatttatcgtgattaaacgctggtttgtaaccggaactgatactgatgtagggaaaaccctggctagctgcgcactgttacaggccgccaatattcagggttatcgcaccgcgggttataagccggtggcttccggtagcgaaatgaccgctgaagggctacgcaacggcgatgccctcgctttgcaggccagtagtaaccaacctctcagttatcaacaggtgaatccactgacttttctggagccaacctcaccgcatattgtgagcgcggaagaagggcgtcctatcgatttttccgttttatccagaggcttgcgcgagctagaacagcaggctgattgggtgctggtggagggggccggcggctggtttactccattgtctgagcagcttactttcgccgattgggttatacaggagaaattaccggtcattttggtggttggcgtgaagctgggttgcatcaatcatgctttgcttaccgctcaggcgattgcgtttgccgggttgccgctggcaggctggatagcgaatgatgtcgtgcccgccgggaagcgacaggaagagtatatggccagcctgacgacgatgattgctgcgccgttgctgggtgtgattccacatttgcccgaagtggcgggacatccgttaggtgagtatctgaatattagtcggttaaacgattaagagcagatatgattcaggggcggcatatctgtaggttagtcagataattggctattttttcttaaataatcgcgagtatggtatcgttctttcaataattctgcgatcgtaaatagattctgaaaactaattcacaacatctatttatggtcgttatttgaaagaaaataaaactggttgtgataatgtaaatccacttaataaggctgattaacgctagattagttagtcctatgtcatcaatttatctttgtatcacccccagtgttattcaggtattggattgataattaatgccacttgggtttctggctcattattcataacgcagtttcagtggttaaaacaagaccgatcaatattcgattaatattaggaatgatattaagcattatttaaaaagccaatgcacgtcatctggtttatttctcatctgtttttaatttacaccagaggtaatggcatgacctttccagaactattaaaattactttctactggaacgaatctggatctcggtactgcggcaaaaagcggcggatgcacgattcaatttgataaaaacattgatgttacttttgagaatcacgataacaacctatatttattttctccggtaatgaatattacctcggtgttgtcggaagatttttttgcttcactattacaaattcaattatttggcattgcgacaaaccgctgctggtttggctatgatgcgggtggtcagcgggtgctgttattctgtttattcgatttaaataaagtgacgccagaagatgcaattgaacgtattgaggttttagtcgatcaggttcagtactggcagcagaatttaccgcagattgccaaattatctgacacccattcgggagcatatcgggttaatgacagctttcaacggccgaggtaaacatgaataatatttctttaccaagattcggtatgcagattttggcctacacggcgcttgatcgaagtcatttattaaacagtctggtgagccgtatttctggtagttcggataaacgtgacgagctggccaataaaataatttcaaacacggtaacccttgggcagaatgcgcttatttccaataagacgcttgggaagcgtagcgccgagattgtaaatcaagggcgaagcgtattctttggcaatacgctgcagcaggttgataaaggcgtcggcccgttggtcgagcttattttgcaatctaaaggtcaaggcggattggcgcaaaatatcgcttcaggtattgcccagtgtcttggcccggtcttattacaagatcatgcggtagaaagagttctggtggccttaaccgagcagaaagggggagaaaacgtcctcaaattggcattagagaataccttgtctggctatactggcggaaaaataatttcggccacgtttatgtcggcattaaaacgcgccatattggacaggccagaatataaaccaacgtcaccattacatcatatggcggcctggaaattacaccaatccttaacttctgatccggcatcactgccgccagccccgtttggtttacccaccatagaagccatcgcgggaactgtccctagtttggtcagcacggtttgtaagcaattagataatattcagaatttattgcagcttcctcttagcgaaaaagagctatcgagcgtattttcagaatgctggccaagtgatttggcggttacaaaggatatgacgagcaaaaatttcgccagtattgtcatgatggctcatgccacaaaacaagaaagtattctcgacgagaaaatcgcggaattgccggatggaatacgtcaatcattccagcagcaatgcaaagagataagaatatttttatccagaatacctgatgcgcaaatcaaacttgcccaaaattggtctggggggactgagagtatctcggtcaatcattctaaggagcactcaccgcctgcaaaattggtggattttatggataatcaatttcgcgcgccggttcatcatccagaagaagtggcttcctattttgccgatggcgctttcatcgacgcttttaaggccggtatcgatcttaaagtggataatcgccaccaaagttatggtcgttgggcgatgggaatggggaatcagttgttctcgcagctgcaaaatataattgggaacgatcgacaagaactgactcatgcacaaagggggcaactggggcaattatctgaaatggtagataataacccaatgagtttaatggccatgagccgttatctggtccctgaaagtattgtttcggccgttcaggatcaggttctcggccaatttactcgtcagggaccggatctgattcttgccgataatatctggatgaaagtaggtaagcctagcgtcagctttgcggtgagtaaaaataatggcgtggatattgatattaaactgacctggccgattagccagtttggtaaaaccgcacagacattagaagctgcgaaagatcatcaaagtcatatcagctcccaggtaaaagtacatatgcttttcaatgagaaaggcgttgagaagcaggatatgagcatctccgcgacccagatttcgcttagagatgaactcacgttaaccgccgcagaagatttgactgaaaataccccgatcgctttcctcaatcgaggggtattaaagcaggcgttcgaaacggcgtctaattgctaagtcacggtaattttttaaacttattacattagacgatactgtccgcacagcttcggaacaaacagatttcatcctcaacgcctgcggccattaaactgaataatgccgcaggtaatgtactcgctcgaacttcatatcaatgcttatctcgaataacagatttatcaaaccgttaagtattcggtgatcaaatcgtcatctaacagcgcaaattttccttgagccacatttcttccctcatcaatcaaataaaagcgatcggccacttgctgaatgttctccaaccggtgttcaaccagtaagaccgtcaggccaatattttggcataactggcgaatgacactgccaatttccgcatttagcgcgggctgatcaccgcaacccggttcatccagaatcagtaattccggttcgggaactaacgcgcgcgcgaatgccaacagttgctgttggttacgcgttagctccccgccgcgttgacggcgctgctgatgtaaaaacggaaagaaatcatagatccagtggggaataacccgatctttgtgacgcccagccagaagcgcgaccagcaaattatcctccacgctcagttgagagaagattggctgcccttgtgggacatagccaatccccagtgcggttcgtcgctctaccggctggtgaagcaggttttcaggcggttcccccccgggttgccaaaccatcgtgccgctttccactggaagatgacccattatgcaattgatcagcgtggtttttcctacgccattacgacctatcagacaggtacattggccgggaggtaactcaagattgatatcccatagaatatgggtgcgaccataaaattgattgaccgattgtaaacgtagcatcagaaaatctcctcgcttggctaggtgctgagggcgtaggctggctgagttctgcgagcaacttttgctgccgttaggccaatcctcagcataaaaatctcaagatatgaaaaaacgtgttggcataaagaagtgataaataaccagtttcagatattaacttgcggctaacggtgatttttactgctaaacagccgttttcagcactcagtctggcctattaacactggaacgcaactcccgctatcacgcttctgttacgccgaatcacagtgaaataagcaactctcgagccaggttgctaacgcataagaaaaaaccattatgttaggacgatgtaacgaaattatttggccacttgcgtaaaatttattggaaatggcataaaccgccggcagctacgggatggcggttgcacctaggcggtgccactctgagggggcgtggtgcaaaaaagaaacaatttgaatcggttgcgcggtggatgactcgtgtaggcggcgaatagcaaattagcaagggggatatttagcactaattgaaatatatagagaaataaaaatgtaaaaaaatgactaaaaaatcctatttggacctgtttttaccttaaccggcggttttctccagctcgcaccacagacgggattgagtgagttatccaccattcctgtggataaccttgtgtattagacacaaaaaactagtcgcaagcgagagaggacgcggcttatgccccggttgtctggattctcttctttttctaaatatacataaattacaataagttaattaaaatcaagacttgagtatttaacactggtggttatgtgtgatctttaatcaatttgttttacagaggttaacaactgcctctttctggggataaatggggtattgtcatgcaaatggcaatatggaatcgagataacggaggtgtcgtgccagaaccagcgctcttttccctatatttatacttgatgctggttttatatccagtatcatagcagtggaaaaaatctgggaggctcgcataattagcttcctaaccgcgcgtgattctccatcgggtagctaattcatgagtaaattattcaaactgcattctgagtttaagcctgctggcgatcagccggaggcgatccgtcaactggaagaaggtctggaaaatggcctggcgcaccaaacgctgctaggggttaccggctcgggtaagacttttaccgtggcgaatgtgatcgccgatctgaatcggccaaccatgattttggcacccaataagacgctggcggcacagctgtatggcgaaatgaaagaattttttcctgataatgcggtggaatatttcgtttcctactacgattattaccagccagaagcctacgtccccagttctgatacttttatcgagaaagatgcatcggtaaacgagcatatcgaacagatgcggctttcagccaccaaagccctgctggagcggcgtgatgtggtggtggtggcctcggtttctgctatctacggtttgggcgatccggatttgtatctgaaaatgatgctgcatctgaccaaaggaatgattatcgatcagcgggcgattttacgtcggctagcggagttgcaatatgcccgcaacgatcaggcgttccagcgcgggacttttcgggtgcgcggtgaagtgattgatattttccctgccgaatctgatgaattggcgctgagagtggagctatttgatgaggaagtggagcgattatcgctgtttgatcccctgacgggccagctgcatcaggaagttccgcgttttaccgtgtatccgaaaactcactatgtcacgccgcgagaacgtattttgcaagcgatggaagacattaaagtcgaactagcgcaacggcgtaaggtactactggagaacaataaactggtagaagaacagcgtttgacccagcgaacccagtttgatttggaaatgatgaatgaattgggatactgctccgggatagaaaactattcacgttacttatccgggcgcggagagggagaggcgccgccgacgctgtttgactatttgcctgccgacggtttgctgatcgtggatgaatcccatgtgactattccgcaaatcggcggtatgtacaaaggggaccgttcgcggaaagaaacgctggtggaatacggcttccgtctgccgtcggcgttagataaccgcccaatgcgctttgaagagttcgaagcgttggctccgcaaaccatctacgtttcggcaacgccgggcaaatacgagctggagaaatccggcggggaagtggttgagcaggtggtgcgtccaaccggtctattggaccctattatcgaagtacggcctgtagcaacccaggtggatgatttgctgtccgaaattcgcaagcgggcggcgattaacgaacgggtactggtcactacgctgactaaacgtatggccgaggatttgaccgattatctggtcgagcatggcgaacgggtacgttatctgcattctgatattgataccgtcgagcgggtcgaaattattcgtgacttgcgcctcggtgagtttgacgtgttggtaggcattaacttgctgcgagaaggtctggatatgccggaagtctcgctagtggcaatcttggatgcggataaagaaggcttcctgcgctctgagcgctcattgattcagaccattggccgggcggcgcgtaacctaaacggtaaagcgatcctttacggtgacaaaatcaccgcctcgatggagaaagccatcggtgaaaccgaacgtcgtcgggcgaaacagcaggcgcataacgaagccttgggcatcgttccgcagggcctgaataagaaagtcggtgatatattgcaactgggtcagccttctctacgtggcaaaggcagaggtaaaggcggtaaggcggcggcagaaagtgcggccaactatgatgcactgacgccgaaggcgctggatcgcaagattagcgaactggaagcgcaaatgtatgtccatgcgcagaaccttgaatttgagcaggcggctgaattgcgagatcaggtacataaattgcggcagcagtttatagctatttcatgatgtcgggttgttcagaaagtgagccgttagtggtggatgctataaatcgggaatttctgcttgtcgcatccgtcattcctgattaatgtgtgcggctgataaattcgtcacctaataacatgtgagatatataatgagcgaccacttgtcgaaagatcctctccacggaattacgctggagcaattattgaccaagctggtggagcattatggctgggaagaactggcctatcgcattcgcattaactgctttatcagcgatcccagcattaaatccagtttgaagtttttacgccgaaccccttgggcgcgcactaaagttgaagaactgtacattcatatgacgcaaaaaccggtgtggatgaaagacgtcaactgagcgttttttattcggttgactttagcccttcaggctcgcgaaagcgggcctgatttgttttatgctatgggagtctggttttatatataagctgaacctatgaaatagcttccatagttgtgcaatgatgtatttttatttcactgttttttcattagttttattaacagataaaagttttacttttttattttttttgtttgtttcatgttaatgatttatcctcttaagatattgtggatatttaagaaaatgcaaaaaataaaaagaatattttaccgctgtatataggcatgctttctgtggtgaattgtttattcttgaccgtaaattactttgccgatattgtcttgaaaaattaatacattatatccttaaattaaataatggctttagccgttttttttgtttttattatttagcgacgctgtgggtttatcttttattttatattgcagttatggacggttcaaatgaatggaatctataaaccccatttattattttctatttttattttaacgccagccacatcattacaggcgaaacctgttgaagatgaacaccagtcttacatggaggttacaggccagattttttcgccaggaaacatgctgcgcagctcttatcagcaggaacagggcaaactggccaaaattgccggcggaacaaatctgattacgccagaggatgaggggcgtctggggactttgcaggacgcactggattatcagccgggtttggtgatacagaatttttttggcggggtcgatcaaccgcggttgaatattcgtggctctggcgtgcaaagtgcgcctttgtcacggggtgttactttattacaggatggcctaccgttaaatgatgccgacggcggttttcatattagcctgttggagcctcgcgaaagtaaaattatcactgcgcggcgaggagcaaatgccaccagtccggtgagcaacgcgctcggcggcgaaattgattttatgtcttataccggtgccgatgaaaatgggcgggcacgctacgaatacggtagctttggtcgccacggatggcagggcgcgctgggcggtagcgaaggcaatctggacggacgtatcagcgtgagcggcgatcgttttagtggctatcggcagcattcgtcttcacggcgaaatgcggttagagccaatattggctatgaagatgagaactttgccagtcgaacttggttcagctggaccgatcttgcttttgacgtggcgggttctttgtctcaagagaaagttcagaccgatccgcgttcggtttttccaatggtatggacgcgcgatcctcaccgtaacgtcgaacaggctcgaatcgccaatcgccttagctggcggggcgaagattggaaaaatgagctgggcgtttgggcacagcacacccatgataactttgtgacgccggtggtctacgtgctcagcgctggtaacacttacggcgcgcagtggcgaaccgagctacagcggggggattgggattatcgccttggggcctcggcagaacgctccgatatggagcgagatttacggcaaaatcggcgcgggacgcccgataatttcaagttgctcggcgcgtacaccatgctggcagaaaatcagaatctggcttttggtgccggctggcagataacagagcaattacgcgttgataccgatttgaaaggtacgcattccgttcgcaatgccaaatcccgcgataagcgcaatgggctggatcaggattggtattttctctcacctaaattgggagccgtttggttcaccggcagcgatctgcgttggtttaccagcctgaactggagccatgaagcgccgagttttcgtgagattatctccaataaaggcgagctgaccctgctacgcccgcaaaaagccgtgacgtgggaagtgggaggtgaaggtgcgttaacccgcagcctaaaatgggatgtgacgctatatcgcagcctgattgacgatgagctgattaccacttatgacagcgaaggtcattcgataggcacttttaactacgcggataaaaccctccatcaaggggcagagattgggctgaaagggcatattccgatcagtgataacagtatcgaatatcgtctggcatggacttataacgattttcgtttccgtggcggagaatatagcggaaagcgaattggcggtattccgaagcaaattattgccgcagaggttttatataaatggaataactggagtattgggccaaatctgcattggttgccggaaataacgccgattgatcatcttaatcgcacggacatacaggctcgcgataaatatgcggtatggggaatgaaagtcgattatcgccatcctgacggctggtctgcttatctcagtatggataatttgaccgacaaactttatgccactgcttcggcaacggagcgagaagtaacatcgaaaaagagtaatacactatttcctggcatggggagatcaattaatggcggagttacctatagtttttagcgctaggcaacttatcacgcccatttttaatttactttattaatatttttagggcatggggtaagtgccatcacgaccttactctttattttaacggcgctatcttaacaatgagtattctaaaactcgcgattattgaataatgcatcggatgctgagatgaatataaaattgcagttgtacagtttttttattttattcggatttttatggtttccgacaatttgtttagcggaaaataatagttttattgatatgaaccaacgtgcggttagtttacttgaaccggtcaagcgtgcggtggttattccaataccggcagcgtcattactggttagccttgaccgtagcactcagcgtctggccggtattcatccttttgccaaagttgccgcgcaggaaggcatgctgagccgcatgtttcctgaaatcgatcttttacccagtgacacagttggtgcgggttttactcccaatattgaaaccttactggccgcgcagcctgatttagtctggcaatgggggcatttgggcgatgatattgttacgcctattgagctggcggggctaaaagtggcgttaattttgtatccgtatcacgacgatagccggatgcagcagtggataacactgatgggacgctccattggtcagaatgaaagggcgcagcaaataattgcctggcgtcagagaacgttagctgaagtgacacaaaaagtggcgcaaattccgcagcaacaaaaagtcagagtactttatctgtcgcgcttcctttcagaaatacacaccatcggtaaaacctcccacactaacagcgatattcagcgcgcaggtgggctgagtattactgcggattttggcggcgctcgcaccattaatcaggaacaaattatggtgtggaatccagacgttattttattgggcaattttgagcctgggcttctccctcgtcatatttatcaaagcccggccttagctgaagtggctgcagtgaaaaataagcgcgtctataaaatccctatcggcggttttatctgggatgcgcctaatcaggaaacgccgctgtattggcagtggctttccatggtgttttaccccgataagatttactggccgctgcgttcggaaattgttcgccagtatgattttctttatcgctatcagcctacagataaggagttggatagcattctgcaaatggacgctaataacgtgacgaaagaatatagccaacgtttcaaggacagagaatgaatatttccagccgtatatatggacgaaataaatttttctggttaataactccgggtctattgctggccgtcatgttgcttgcattgtgctccggacgttatccgttatccgccgggaaagtcctcgctattctggcatcatcctttatttcaacagaaagtctggcggagtttgttcaatggacacctattgaacaacgcgtggtggagtttattcgtttgccgagaatgcttattgcgttgctgaccggcgcgggtttatcggttgccggagctgcgcttcaggggatatttcgtaacccgttggtagggccgcaaattatcggcgtatcctcaggtgcggctttgggaggcgcattaggaatagttttattttcctcgctgatgatgatttccggcctggcttttattggcggctttttagctattttgctggtttattttctcagtcgcagtagcggagcctccagtattttgatgctgattctggccggcgtggtgattagcgcctttttcgccgcgttaatttctttagtgacctattttgccgatccgaataataccttgccggcgattgttttctggctgatgggaagctttgccaccgtgacataccacaagctagccttggctactttaccggtactttgcggtttagcgctgctttatgctctgcggttccgtattaacgtgctatcgctgggggatgaaaatgccgccgcgctgggcgtgccggtggagaaagtgcgttggctggtgttgatttctgttgcgctgattacttctgccaccgtagccgtggctggcactattggttgggtcggattagtggtaccgcatattgccagaatgctggctggtcctgatcatcgccagttgctgcctgcctcggcaatcattggcgcaatttatatgatggcgatcgatacgctttcccgcagcgtgagcagtgcagaaattcccttaggtatcatgactgccttgataggagcgccggtgtttgtctggctgctgcggcaaactcagcagaaaggatggactcatgattaatatcgatcggttgacgttaatccgaggagaaaaaacgctgtttgaacgactttccctccagatagagcaaggcagcgtaaccgctattctgggcgcgaatggacgagggaaaactacgcttttacgcctgatcatgggcgcgattaagcccacttcgggccagatttccgttgctgcgaatattggctatgttccgcagcaggaaaatgcggtttttccttatagtgtcagaactatggtgatgctggggcgagtgcgacacatgggctggtttgcttcgccaaaccggcgcgatagcgaagtgactcagcaatgtctggattgcttcgggctgtcgccgttggcggataaaccggtgaatcagctaagcggaggcgagcggcagttggtgagtattgctcgtgcgttggccagcgagcctgagattctgattctggatgagcctgcttcggcgctggatctggcaaatcaggacaaagtgctcagcgggctgcgggatttatccgcccgtttggagatgacggtggtgttgactactcattctccgttacacgcgctgcatattgccgatcggactttgttgctttatccgcagactgacggggaagacacgcaggtagcagagcaaacgaagggcgtcgcctttggcctaacgcgggaggtggtaacggataagaatctgacgcagctttatcagttgccggtacacgtagataagttggattttgcgggaaaaactcgggatatatttatgccgttgtttaactgatccagcgtgttctgtcggacataagcccggtaaataccgggcttgagaggtttaaccgagtttttgcagcgtttgctccaatgcctgacgcagtaattctcgatcgtgacgataaggaatatccttagcttccagcggctgctgagtcacgatacgatcttgtacaccgctagtgtctaccgttgggctaaccactaccgcatcaatcattttacgaccgattttgctttccatcatcgccagcttgtcctgtaacgtcagagcggcggcggccacgctgagttccttaccaagattaccaatgtaaatcatgctggcggagctacggcgcaacgcctgagttaaatcatccagcaacaacaacggcatcaggctggttaaaaagctgccggggccgatcaaaatcaaatcggcctgactaatggcttcaatggcttctcgcgtagcgctaacgtggggagacagcgtcatttcctgcggcatatgggtcaattggtcaatattgacctctccataaaccgggtgcccttcgtgatctaacgcctgtaaatccaccggctgctcggacatcggaatcagccaggcgtccacttttagcaggctgcgcagcagattgatggcttccatcggcctgacactcaagtgatccagcgcctttaacatcaggtttccgagattatggccggataattcaccattaccgctaaaacggtactcaaacatggcagaagcaacgctgggttcagtaatcaactggttcaggcaatttcgggtatcaccccaggcaataccgccttcagagcggcgaattcggccagtagaaccaccgttatcggtggtagtgacgattcctgtcaggcgtgatcctaatggagaaagggctgacataacccggcctaaaccgtggccaccaccgagtgcaacgactcgatccagatcggctaatgtgcgatttcgcataagtttcctatcgatttgccccaacccggtttatttatcaaccaaaggcataaaaatttgccataagttaacggatttatggcaaaaacgcgataaaagccgcagtttccgtgatattggacaagaatttatcccgcgaatgatttagccttcaaacctcgtttcatggtctgctaagtcgttgtatataaaaatatatagcgcaaagacccgattggctatcccgacgttttagcgctagaatccttgggaaaaccacggtttctcctgacagtctttgggccgtcgctgaaatcaaactcctagcctctgtgtctacgttgctcacgcaatatgatgctttggccgtggcattgagccaccagggtgcgaggtagaaatgcctgcatctcccgtatttggaaaggtgttatggtaccgcaactgaccgacgcatttgcgcgcaagttctattacttgcgcctatcgattactgacgtgtgcaattttcgttgcacctactgcttgcccgatggttatcaacccaatggggtgaaaagctttctgacgctggatgaaattcggcgcgtcagccgcgcttttgccgaattggggacggaaaaaatccgtctgaccggcggcgaaccttccatgcgacgcgattttaccgatatcattgctgctatccgtgaaaatccggcgatccgcacgctggcggtgacgaccaatggttatcgtctggctcgcgacgtggcggcgtggcgcgatgcggggctgagcgctatcaacattagtgtcgatagtctcgatccgcgccaattccatgccattaccgggcaagataaatttcatcaggtcatgcagggcattgataaagccttcgaagtcggttttgagaaagtcaaaatcaacgcggtattgatgcgtgatgtcaacgatcgcagcctgaaagcctttctggactggataaaaccgcgcccgattcaattgcgttttatcgaactgatggaaaccggtgaagggagcgagctattccgtaaacaccatgtttccggcggagtgattcgccagcagctactggagcaaggttgggtgcagcaagaccgtgcacgaagcgacggcccggcgcaggtttatcgtcacccggaatatcagggtgaggtcggcttgattatgccgtatgaaaaagatttctgtgccagctgtaaccgcctgcgcgtatcggccatcggcaatctccatttatgtttgttcggcgagcaggggattcctctgcgggatttattatccggcgatctgcaacaggacgaactgaaagaacgtattcaaagcgcgttgcaaaccaaaaaacagactcattttctgcatcaaggcaacagcggtatcacgcagaatctctcttttattggcggttaacgcgttggcgcattgcgctatatcaggagtatttatgacccaattaactcatattaacgccgccggcgaagcccatatggtggatgtttctgccaaagccgaaaccgtgcgtgaagcccgcgcggaggcgtttgtagaaatgcaggccacgacgctggcgatgattattgatggtagccaccataaaggcgatgtgttcgccacggcgcgcattgcaggtattcaggcggcgaagcgaacctgggagttgattcccctgtgtcacccattgatgctgagtaaggtggaagtcaatttgcaggctcagccagagcacaatcgagtccgaatcgaatcttgctgtcgtttgaccggtaaaaccggcgtagaaatggaagcgttgacggccgcttcggtcgccgcattaaccatctacgatatgtgtaaagcggtgcaaaaagacatgattatcggccctgtgcgtctgctggcgaaaagcggcgggaaatccggtgatttcgaggtaacagtatgattcaaattctcttttttgcgcaggtgcgcgagctgctcggcaccgagagtttacagctggtggcggaatatcctacggtggaagcgttgcgccaggctctgtgtcagcgtggtgaccgctggcaactggctttggacgaaggaaaattgctcacggcggtgaatcaatcgctggtcagttgggatcatccgctgtctgctggagatgaagtggccttcttcccgccggtaaccggaggctgaggatggaaaatactcgcattcgcgtcggcgcggagccatttaacgtcggtgatgaatatcaatggttggctcagtgtggcgaggacggcgccgtcgtgactttcaccggcaaagtgcgtaaccataatttgggcgataatgttagcgcgctgacgctagagcactatccggggatgacggaaaaagcgctgggagaaattatcgccgaagcccgtgagcgctggccgttgcagcgagtttcggtgattcatcgtgtgggatcgctgtatcctggcgaggaaattgtgttcgttggcgtgaccagtgctcaccgcagtgtggcctttgaatcagcagagttcatcatggattacctgaaaactcgcgcgccattctggaagcgcgaagcgactcccgcgggtgagcgctgggtcgaatctcgcgattctgaccatgaagcggccaaacgctggtaaactcatgtaaataatgccctaaaatgcctattttaactcctagggggcgggctgttttgtggtaatcttaggaccaggtgggccgtcaaggacggtctgtatcattgttcacatgcagaaggtaattaccatgggccactatccacgctctaatggttcgattgtcgaacgtgctaacacaggcattcaggcatatatggcgcaggtatatggctggatgacctgtggtctgttattaaccgcctttgtggcttggtatgcggcgaatacgccggctatcctccactttgttttctctagccagattacgttctttggcttgattattgctcagcttggtctggtatttgttatttccggtatggttaaccgcctgagcggcaccatggccaccagcctgtttatgctgtattcagcgcttaccggtttaacgctttccagcattttgatcatgtataccggcgcttctattgctagcacattcattatttgtgctgggatgtttggtgccatgagcatttacggttacaccaccaaacgtgatttaagcggtatgggcagcatgctgtttatggggctgatcggtatcgtgttggcctcactggttaacatatggctgaaaagcgacgcgttaatgtgggccgtgacttacatcggtgttgtggtgttcgttggcttaaccgcttacgacacgcagaaattgaaaaatatgggcgctcagttggacgctaacgataaagacggtttccgtaagtatgccatcgttggtgcgttgaccctgtatcttgatttcatcaacctgttcctgatgttactgcgtattttcggcaaccgtcgttaatttgggtgattgagggcagcgtcaaaaccattcatacgttacgctgtgattgaaagacaaaaaggccaccttatgaggtggcctttcttttgaatgacaacggcggtgatattttttcgatgattagtgttatctatcaaattgtaaatcagaatagttccgctcttttcccctcatttcaatagccacatcttgcccatcaggcaattttacgtctgaacatcccgtaagcggcgctgcccgttgtcgcggtaatcaccaataagggccacaggctgtgccagataatatcgaagctggcatccttcaggtaaatctgtttggtgatatcagtaaagtggcggataggattaatccaggtgatgttttgtagccacaccggcatattttccaccggcgatacatagccggaaagtagtatggcaggcatcataaacacgaataccccgataaatgcctgttgttgagtcgagcacagcgatgagatcagcaagccaaacccgaccagcgatagcccgtaaatcagcatggtgccgtagaatagtgccagcgacccggcaaagggaatttggtagaagaaaatgccgataaatagcacaattgaggcctgaaaagtcgcgacaatcagcgctggcaccgctttaccgataaatatctgccaggtggtaagcggtgataccaacagctgatctagcgttccctgttcccgctcacgtgctaccgacagcgaagttactatcagcacgccgatggtggtaatcatcgcaatcaatgacggaaccacaaaccatttataatccagattcgggttataccaatttcgtactaccagtgcgctgttattcggttttatctgtccctgcgtcagctcgtcctgataattttgaattatttgctgaatataattggccgctatctgggcactgttggagttacgtccgtccagaactagctgcaatggcgtggtgtgtccgttggctaaatcggcgctgaactgctcgggaaaacggatcagtaatagtgcgcgctggttatcaatcgttggttggatttcctgcgggctatggagcagcaaaacgttagagaatgccttcgccttggcgaaacgctgcgtcagttcaattgatgcttttccgctgtcttcgctataaatagcgatggtagcattagtcacttctagcgtggcggcgtaggggaacagcaccacctgtaaaataaccggcataatcaatattgcccgggtttgcggctcccgcagcaaagactgcaattctttgataatcaaagtataaagacgatgaaacatcatagctccttgctcagtcgagtcggcgttgggttttccacgccgtcaggccgataaacacaatggccgaagcgatcaggaataacaggttaatccacagcactgtgccgatatttccggctaaaaacagggtttgcaggctgctgacgaagtaacgagcggggatgatataagtcacggcccggactatcgcaggcatactatcgatctcaaaaataaaaccggacaacataattgatggcagaaatgccgcattcagcgccaccatggctgcgttaaactggttgcgagtcacggtagaaatcagcagccccatgcctaaagtgctggccagaaacaggctggtcatgacgaataaaatccacagagagccgcgataaggcaccccgaggataaataccgagaccgccatacacagcaccatggcgatcataccgaggaagtagtagggaataagcttggaaagcaatagctcgctacgcgtaacctgcgtggagagcagggcttccatggttccgcgctcccattcgcgggcaatcactagcgaggtcaaaatagccccgattaccgtcataataatggtaatcgcaccgggaataataaagtgctggctaattgccgctgggttaaaccaatagcgcaactgcacatcaatcagtggtgcgttggtttgccctagattttgcgattgttgttgctgccagatttgccaaattccttgcgcataaccttgcacaaagttggccgtattaggctcgctgccgtcggtaatcacctgaattggagacgtatctaatgggcgatccagccgttgggcaaaatcattgggaataacgatcagcccgcgaattttccctgcttgcattgcctgaatcagcgcctgacggttatcgctgatttgggcggcaatataaggcgagccggtaaaggcgttggccaaatcctgtgccggcttgctttgctgctccatcaaaatgccgacatgtagtttgctggaatccagattgataccgtagccgaatataaaaagcagcatgattgggatgacaaaagcgatcaggccactactgggatcgcgtaaaatttgtcgggtttctttgcggcacaacgctcgcaggcgtcgccaggaaaaaccggtatcctgataggtttcgctgttatctatcggagcggcagggtgctcagacatggctctgctccttatcgtagttttgtactaactcgataaatgcctgttccatggaaggattagggttatcgtcgcgggcgacctgctgtttcagctcatctggcgttccggcggcgatgattttcccacgataaaccagaccgatacgatcgcaatattctgcttcatccataaagtgcgtggtgaccatgacggtgacgcctttgtcaaccatgccattgatatgtaaccagaattcgcggcgagtcagagggtcgaccccggacgtgggttcgtccagaaacagaatgtctggttcatgcatcagtgcgcaagccagtgccaaacgctgtttaaaccctagcggcagagaatccggcgtttgattgagaatcgacgtaaagttaaaggcttcggtcatatcacggattttatcccgctgtaccttgccttgcaggccataaacaccggagaaaaacttcagattctgcgcgacggtcaggttgccatacagcgagaatttttgtgccatatagcccaaatgctggcgtgccttgcctgaactggttttcaaatccatgcccagtaccagcgctttaccttcactgggaaccaatagcccacacatcattttaaatgttgtagatttccccgccccgttagggccgagcagcccaaagatttcaccgcgttttacctgaaaatcaacgtgatctgttgcggcaaaatcgccaaattttttcgtcagcctctgagcttcaatcacggtttcagtgtgatcgccgctgaccgtcggcatgattttcgctaaagcggattcactttctggcccaccgccgagcagatcgataaaagcatcttcaaagcgcggatcggcctcttgaatctcagtggttggctggtttaactgctgcaagagctgttggcgatcggcatcgggtttaagaatcaaacggacatatttaccctgaatgactccgtcgctgaccagcggtagcgttaatgcccgctgtaaaagttttcggttagtgccgttttgcgctgacagcagaatagtgcggccgctcatacgttgggtaagatcttgaggcgcaccgctgtatagcaatttaccttcgttaagcagtagcacctcacggcactgttcggcttcatccagataggaggtactccagagaatcagcatgccgtcactggccagttcgtgcaccatgcgccacagttctcggcgggaaataggatcaacccccacgcccggttcatccagcagtaaaacctgaggttggccgaccaaagtacaggctaaaccgagtttttgcttcatccctccggacagttttccggctaatcgatcggtaaagcgcgtcagatcggtaaagctgagtagacgatcaaaagtctgacgtcgttgctcgccggtgacaccgcgcaggtcggcgtacagcgtcaggttctccatcaccgtcaaatcttcgtataacccgaatttttgcggcatataaccaagaattgaatgcaactggcgatcgtttttaattgggtccagacctaccactgaaagctggccactgccgggtttcaacagtccggctagcattctcagcagagtggttttccctgcgccatccgggcctaccaatccggtaactgcaccgctgcgtatttccgtggttaaactggccacggccggatgatccagtccagggaaggttttctctaccccatccagagtaatcaaatgctgtacttcagccatgacaatgcctctcgattaaggttgtgagaagcgaatagtcaccggcataccctgacgcaattcttcatcggcatcggtaacaataatgcgcaggcgatagaccagatcggtgcgtaaatcgggcgtttcaacggttttcggggtgaattccgcggttggagaaacgaaacctatcttaccgtgatacggcttattgggccggctgtcggtatacacttcgatttccgcgcccggtattgcctgacctaaatggcgctcatccacataggcgcgaatccagaccggagtggttaacgacagggtgaatacggtgttgctggcagacaaaatggtgcccggttcaacggcccgggtcaaaatagtcccggcagaaggtgaggttagcgtggtgtcatgcaggtttaattgagcctgcgccagttcagcttccgcctgtgcgacattggcttcagcctgagcaatttcctgcgggcgattgccgctcaggaattgggccagtttatctttggccgcttgcagcgcagcctgcgcctgattacgtgacgtacgcgcatcttccaactcgttagcggaggtggcttttcttgaccacaaaccctgctgacgttttaaatagctatcggcgtagttaaaggctgctactttttgcgccatttcggattttacctgtgcgatttcctccgctcgataaccggctttcaacagcgcgagctgcgcttgcgcgctggcaagattagccttcgcctgatttaacgcattgttatacgggccctcatccaactgaccaagacgttgacccggctggattttatcgccttcatcgacatccagtgaggccagacgaccgccgacacggaagcccagattcaccgtgcgaatatcaacgttgccatacagagtgagcgttccattttgctgttggcgatagtagctccatccatatagtgccgccgcaatgacggcgataacgacgactatcactgcaatactcttgcgattcataacattccctacctgcaaacatgtaattattgctgcgccgcctgatgccgcagcccgttgagaagaaggtcgatatgttcgataagcacctgatttattaacttattttcggcattgccaatgtcgttccaacccgcctgatagcgtatggtttcccgcgccatgcgaaatgccaatacttcgcccaataatgcatgggtatgaatgatggttttggtagcaagagcgtcagcgccaatgtaattcgccaacaataaattaagtttatggtgtagtggggcaatcgcctgttgatgaatcaatggataggcttcggtaggggaaagctgttcccgagccataattttgctcagattaatggtttccggctgagtcattaaatggctgaattgcagcacaccctgtcgcacataatgtaactgtcgttcagcgcattgctcggatggcggcgtttgcaaaaactggtcaatttcggccgccagaggcacgaaagcctgacgaataaaatccgcaatctgctgcgctaccgccagatagagtttttctttggaaccaaagtagtaggtaatagcagcaatattttggtctgctcgctgggcaatatcgcgagtggtcgctcctttcaaacccaattccccaaacagctcggtggcggcgcgcagtaactgttgccgtgcctgttcaccgcgcaacgttaccggaacgttggaatggggcatgataaagtctcccttatggatagaatgaatttacgctaaagccttatggttaggctggaaataaattaatcaatcatatgattaactttaggccataagtataggcctgtaaagatggggaataggaaaggatctttgactggcgtaaggcaatttttctacagtttttacctataaattcatctgattgtttaaatatctcatgttttcacaaaaatctgatataatccgcctcaatggtgcactgcagtttgtgccaatcctcgtggtaaagcctcatttaatacctcgtctgatcatcttcccttgaaactgcacctgactgaattgttaggatggggaagatctggagtttctcgtaatatgtcatttgatactctcggcttaaacgccgatatcctgcgtgcaattgaagagcagggctacctcgtgccgacgccaattcagcgtcaggcgatccctgtagtgctgcaaggccgtgatttaatggccagcgctcaaaccggtactggtaaaaccgctggtttcaccttgccgctgttgcaaatgctcaatgataccgcgcagccgatcaaaggccgccgtccggtacgtgccctgattttaaccccaacgcgtgaactggctgcacaaatcggcgaaaacgtcgaacagtacagcaagtaccttaaattacgttcgctggtggtctttggcggtgtgagcattaacccgcagatgatgaaattgcgcggaggcgtcgatattctggtcgctactccgggccgtttactggatctggaacatcagaacgcggttgatttgtctaaaatcgaaattttggtgctggatgaagccgaccgtatgctggatatgggctttattcacgatattcgtcgcgtgttggctaaattgcctgcaaaacgccagaacctgctgttctctgcgaccttctccgacgaaatcaaagggctggccagtaaattgctgcacaacccagcttccgttgaagtggcgcgtcgtaacactgcctctgagcaaatcacccaaagcgttcattttgtggataaaaaccgcaagcgggaactgctttctcagatgattggcagccaggattggcagcaggtattggtgttcacccgaaccaaacacggtgctaaccatttggcagaacaattgaataaagacggcattactgccgccgctattcatggtaataagagtcaaggcgctcgtactcgcgcgctggccgactttaaagacggtaaaatccgcgtattagtagcgactgatatcgccgctcgtggcttggatatcgatcagttaccgcacgttgttaactatgagctgccaaacgtaccggaagactacgtgcaccgtattggtcgtacaggccgcgcggaacgtaccggtgaagcgatctctctggtttgcgtcgatgagcataaactgctgcgtgatatcgagcgtctgctgaaacgtgaaattccacgtatcgcacttgaaggctacgagccggacccaagcatcagagctgagccgatccaaaacggtcgtcagggacgcggtgcttcccgtcctggtatgggccgtggcagtgccacccgctcacagggcggtgcagttgccggccgtggtgatagccgcggcaacagcagcaaacctcgcagtcagggtgacggtcagcgccgttcagcgccaccttcatcacgtccgggcagccgtaaaccgggcgagtaaatcgttcgagcttagggaaaaccgctcattgccgagcggttttttttgtcctaaattcggctattccgggctaaattcgcgttatttcttgtcttgtcgcaaggttcgctcgtatcattgccggtcttttttagggggtattttgatgcagatattcccaccttatttttcagcaggcaggtaatcaggtcatgcgggtacttttggcaccgatggaaggcgttctggattcactggttcgcgaattattaagcgaagtgaatgattacgatctctgtatcaccgagtttttgcgggtggtcgatcagttgctgccagccaaatccttctatcgttcatgccctgagttgcatcatcaaagccgcactccgtctggcacattagttcgtattcaattattaggccaatacccagaatggctggctgaaaatgccgcacgcgcggtcgaactcggttcctacggcgtggatctgaactgcggttgcccgtcaaagctggtcaacggtagcggcggtggggcgactttactgaaagatcctgagctgatttatcaaggggctaaagcgatgcgcgaagcggtgcccgctcatttacctgtgacggtaaaaatccgtttaggttgggactcgagcgatcgtcagttcgaaattgccgatgctgtacagcaggctggagccactgaactggcggttcatgggcgaaccaaagaagagggctatcaggccgatcgtattaactggcaggcgataggtgatatacgtcgcaggctcactattcctgttattgctaacggcgaaatctgggattacgccagcgcgcaggaatgtatcaaagtgaccggctgtgacgcggtgatgctagggcgcggcgcgttaaatgtcccgaacctgagtcgggtggtgaaatataacgaacctcgaatgccttggcccgaggtggtgaagctgctgcaaaaatatgttcatctggaaaagcagggtgacaccggtctgtaccacgtagcccgaattaagcagtggctaggatatttacgtaaagaatatgacgaagctaccgagctatttactgaaattcgcgcgctgaaaacctcgcaggacatcgcgcaagctatatgccgttaacggatttttgctaacggcataacattgacccgaacaaaacccctgctacgtgaaacgcctccttccagcaaacaatatcagatatgtaccagacagcctcgtgcaataaacggggcgagtacttctggcaattcggagaagttattccagcgtaaatccaagcgctttaactggctcaattctgagaagctttccggcagggtggaaagtttattggcgcgtaaatccagactgtgcagatttttcagtgcgccaaagttttctggtagctgggagagttgattaaagcgaaaattagcatcagttagctggggcaggacacaaaactcattaggtaaataatccagacaattatctgaaatatccagcacgtgtagttgcttcagggcggcaatttcaggagcgattgaagcaattttattcttcatcaaatgcaactcttgtatctgatgaaggtgccctatggccgaaggtatagctctaatcgcattgttatacagtcgaagctctttcaatgctgagagagaaaatatagctgagggaatttcttccagctgattatcggtcacatttagataggtcaaatgctgtagctcagccaaagttgcgggcaaatcactcagatgattatcgctgatataaagatattccagctgttttaacctcccgagttcttgagggaggttttgtatacggttatgaccgagatctaacatgcaaagcgacgataattcgccgatactggccggtatcgatggaatgttgttgcaggataaattaagtacctgcaacttctgcaatgagataatctcttcgggaaacgctgtcaggcagttattgtacaggctgagctgttgtaatcctgacattgtgcttaggttctcaggggctgaacttagctgtttgttatccagattactaacctgaatggcccgtttttccaccgtggtagcgattttcgggtgctgatgaagcatcattgtattgtgccttttctttatgctttgcctgatgtgccaagcataagcttttttgccgctagcgatgactttttcccatggtataaccatgggctgagtcagtacgtatcctttattgtgaagattgttctgcgggcgagacaaaagctaggcaccacttcatttcttttccctgccgggtaacaaaaacatagtcattcatctcggaaataggcaagcctgggaaggaacgcagaacatgctgaaaatcagcatcctgacaggaagaattcagcgaactcagaaataaaccaccggcttgggaaatctctttttctgaaatattgggggtgtagagattaggtttttcattattagaccatttttccgccataaggggacggtctggggcgtagaaagtcagccactgtgagaaatagccaccgccgacgtagcgaagtggaacttgatatttatctcgccagatttgattaatttcggcgcttagcggttggatatagttaaatttgctgcctgcgccgcgaatatctttatacaacactgtcgcgtaacccagacaaaccgcagccgcgacaattaacagagatagattgatgcctcgccaggatttcactcgttcgacattaaggaagcaaagagcgataacaggggataatacggtaaaaggctgtaaccattcggtgattcgtcccccgctgttaaacaggaaatagccgaatatcagtataagtggcggggtaaacacgaaaagaacggctttcttttcgtctgagtccggctgtaccaatgtggcattcagcattttgagtagcagaatgatgatgataatggggtagaaaaccacaagagcggaaaccagtactttactgttaagtcccgcgtttatttgtgaatcaacccaattgaaggcggcaaagtcgtgctgataaagccaaaaaatattgggggcgataataagtaaaaatagtaataacgaaagatagaactctttgctattgcaggattctcgtccttttttcgtcgagaaggcataaataagcataaacggaaaaaatgcaaagctggagtattttgacatggcggctaacccgcaaacgacagctaaggcataccagtaagctttattatcataaatagattcaacgaaaaataagaataagtacggccaaaacatcacaagtagataattgtcattataagaaattatatcaaaattgataacgccagataaatttagcgcgagcatagagaaaaatgcgattttgtaactgccaaacagtcttcggctcagaaggaaaacaccccataaaccgacggcaataacggtaaaatgcgaaacataccaatataacgcaaggtttatcagtgggttgatgagtagacctatagccgtaactgcgccaacgatatagggatttttcggtgagccaaattcgaggctattcgcccaattcagggactctacggcatcgtagggaacagccggatctagattagatgagatcgcaatccatattacgctgtaaattaatataaataatattgcgccggtcttgtagttatcgtcactgccatatgtcatttagaactaaccttactcttataattgcaaatcaatttgtcattattataattacgcgtctgtgttcaagtgctttctcctttctgtttagtgattgtttaaatgtgttttttataaatggaaatagtgacttaatttaacttagatttgtttttttgtttaatgttcatctaggaataacttaactttcaataaggctatatcttctttgctattagaataactaatggaaattaacgatattcagagaacgtttttttatgttagtcgcgcgattgtcaataatcgtaagcgacccttttaaatctttgtaacaatgatttaaagaatgtctgatgcgcagtttatatgggtaacttatactgcttggagtccaacccacgtcacctaagccaatccatatgcatgtgaaaatacgtttatcaatattaagtctgtttattttatcggctacggccttgagcgttcctgtgacgagtttcgccaccaccagtgctggcgtacaacaggcagctccgttggagttagcctctggcagcgcgatggttgtcgatttaaaaaccaacaaagttatttatagtaataatcctgaccacgtagtacccattgcctcaatcactaaactgatgaccgcgatggtggctctggatgccaaacagccgcttgatgagattatttcagttgatattcatcaaactaaagaattaaaaggtgtattttcgcgagtgagagtcaatagcgaaataaaccgtaaggacatgttattactggcattaatgtcatccgaaaatcgcgccgcggccagtttggctcaccattatcgcggtgggtatagtgcatttattgctgctatgaatgctaaagccaaatccttaggcatgacccatacccattttgtagaaccgacagggctatcaacccagaacgtttctactgcgcgcgatctcagtaagttgctgctggccagtaagcagtatccgctcattggtcagttgagtacctctactgaaaaaatggcgactttccgtaatccgaattacaccttacctttccgtaataccaatcatctggtttataacgataagtggaatattcagctgacaaaaacgggttttactaatgaggcggggcattgtctggtgatgcgcacggtcattaataatcgtccggtcgctttggtggtattagatgcttttggtaaatatacgcattttgctgatgctaaccgattacgcagttggcttgaaaccggcaaagcagcgcccattccaggtgcggctaaaagttatcgacagcaaaaagatgctcagggacgtttagcgaaagtatctgaatgatagaagattaagaggcaggaatacgcaggatgcaggtgtttaacggattaaaatgaattcgcggtaggataaccgcgaattcaaccaactttaaaaaataagcttgaagacaccggtaatagtcagcaggccgacaataaaaattatcgcgataatccataatataatcttcatttgtttcccctcaaagagagtgaaaataacgccaacccaggctggcaatgtgatctcactatagtttatctttttccatttcgcggtacttcttaccaatcatactgatttttaagacttgactgaaagatagctcaaaccttactaacgccagcacttatgttttgaggtttttcctatccctggattaaaactgttggttggatctattgcctgataaaaagcctttaattcaggtttagccaaatagagatggccaacattatgttcggcggggtattcagcgcctttcgcctgcagaatttctaacatcttatctttgatttcctgcggactctcgcctttcttgacaatataatcctgatggaaaacgtgacacataaaatgaccatagtagagttttgctaccaaacggcggtctatttcttcaggcaaggtttcaaaccactgatcgtcattgcggcgcagagcaatatccaaagccaatatatcttcgaccttatcgctatgaactgaatggtaacgaactgctgcaccggcggcggcaaaacgatgtaaaaaggccttctttccttcgtcagcggtgcaaaccagatagttaccttccgccgttgcgaaaaatcgacgtaaatgctcgttagcttccgctattccctgaccggacattttcagcatcaggtgatgttcatatttatctcggtagcttttcaggcgtttaggaagatggctaggcaaaatacggctgaagccctgcatgacacgatcggtgatattgttgatcaaaaaaggaactttattcagtcgggcatcgatctttccttttagggtaaagaaagtcggcatcttatccgtacccatagaattgatcatgataaaagtgtctttgccataaatttcggcgatatcaaaaacgtcccggtgcatatattctcctgcaaccggtaagtgtttaaaatcacgtaaaatagtacgacgtaattctgtcagcaccttggtgtcattggtgccaatataaaatacctgttgctgagactccgctgggaaagtatctaaacggacggcaaaaactgcgagctttcctgcgcagccggaggcttcaaataagcgccgtttatcagcattaaaacgcgacggcgtatcggcatccacatctcgcactcgttcaacataatcatgatccgaggctttctgctcgccatgaccaatatcttccgggccataatcggcacgggttaaacgccaaagaatatcttccggcgtgtcacccagatggataccaagatggttaactaattgaagttcgccatgctcatttatctgagcaaaaagtgccatttccgtataagccgggccacgttgtattagtgaaccgccggaattattgcaaacgccgccaataaccgaagcaccgatacaggatgagccaataacggagtggggttcgcgaccaaagggttttaagcgtttctccagttcattcaacgtactgccggggaaagcaatcacctgttcggcattattcaataactgaatctgattgagtcgcagcgtgttgataataacaatctggcgatcgtaatcatttccactgggagtggatccttccgtcaggcctgtattggctgcctgcataataatgattttatctgcggccaagcaggcttgcagtatttgccattgctgcattagcgttgcggggaaaacaacggccagagcttccccttgacccgaacggaatccggtccggtaacgtttggtttgtcgctcttttgtcagaaggtaactctcaccaacaatatttttcagttgctgcaataattcctgattgttgtcaccatcggtacgattcatttttctcacctagagtacgaacatcctgttttgctgcgaaagtaaatctgaatagcttatttgttgaaatcgatgctttctttcgttgccatgaagtaaacatgaggctgaggtttctttccctactgtggggccgagtttgtgatctatttcacacactgaaggctatttataaccatgggtgttaatcgcatcggatttgatccagcttatatcaacctgtggctaacagacttaaggcataattgagtagatataaggttttcttacgactattttcctatcagggcggattcaatgagtgagcattttgttgggaaatatgaggttgaattaaaatttcgagtacagaatatccgtaacctattgaggcgaatagaaacgcaggatgcagagatttttgctctcaataatcatgaaaaagattgttatctggatgcttgtgatggcggtcttgcacggcaaaatatcagtatgatattgcgtgaaatgaacccgtcgggtattcggctatggattgtcaaagggccgggaagcgagcgatgcgaagccagccgggtcgaggatttgggcaagatttcgagtatgctggtgactttaggctatcagccggtatttaccctggaaaagaaccgcagtatctattttatcggccaatttcacattacggtcgaccatttggagtctgtgggaaattttgctgaaattgcggtgatgacagatgatccgaatgaattggcagaattaaagctgcaatgcagtctttttgcctcaaccctaggattaaccgcagatatgctggaacctcgtacttatcggcaattactgggcttctaagatcccggcattgcagtaaggtacaaatttggcaattgaccggtgaaaataacgatataggtattctcaccggtaaacagaccattatttttttaatagagttttgagattggcaaaagggttgtgagtagcgacaccctgatctttctgcgcgtcatctccggcaataaccgtcgatccgtattgatcggcttcggtatatttagaatgctcgtgatcgtggcaaaacaggcacaacatctcccaattgctgccatcttccggattattgccgtggtcgtgatcaatgtggtgtacggtcaactcacgcagattagaatacacaaactctctggaacactttccgcaaacccacgggaagagttttagcgctttctcgcggtaaccgctttccagccgggcatagtttttagggatataagccatgggaaccttcaattctgtcgtgtgatatctgaacttattttagcgtgaaagaagattcgtcaccatgattaaggtactggataggctttcctcgtatggagttttagtaaaataacgatagattaacccactgagtcaagagccatagacacgacttgatacaagaaaattttattatatcgatttgggcgtattttatttttatcattcgatttttcatgtagcgaatgggcattaatcgagccatttttctttcatataatggttttttgagactttttccaatgatttaaacggctaagacgttttacactggtagcataattaggctaattttatctggagtaagggaataatccgcccgttgcccgataattattctttgccgataaagttgaggcgatatgaaagaatcagaagtgctggccgaagtcagtaatgaaaaccagacactggtggctgtggtgcaacaagatcagcgtgtggtttatttctatatttacccgttggagtccgttgaagatcgttttccggtgcgtgcctgctgggtaagaaatctgactgcggctccccagttagatgataacgcggctattgagcaggggcttgccccgcgtttggctgcggcctattgtcgaaatattgctggtgaagaagcattggatgcgcaatatattaagattatctggtcagaaagtgatgacggcgcagcgctgtggtatcaggggcaattattggcggtgattcccggctggagtttgtatatcgatcactctgtctgttactccgctagctgtattaaagagaatccactcactttacctttggggtctgcgtctactaatacgcaatatgctcaggcggaacgtactcgacaattttggcgagtctggcagcaggaggaaggtaatccctggcccagtatgcaagtggaatatattcgacgctatgagcaacattttggtccggcgcaaaagtattatgctattgatcagggcagatggccgccaatggcgatctctcagcatgaaaaggatggagtttattattttctgacgctgggtgtcagtattcgtccgcagccttgggttgagattttatttaatgatgatgccgggaaatatcgtcgaatagaattagcgatggcagtggatagtcaatatgtcaacgaagacaacgccgttcgcatggcgagtgctttagccggttttgcccatgttccgtggggaaaaataagctggctgggagaaggccatgcactggagtctgaagtcgcccctcagggttacgaaggctatgtattatcggccaatctatactctgagcacgtcagtctgacgttgccggagcagcagggcgatccggtaaacatttattgggccagtccgatatttaccagtgagcgggagtttgcgcattcgctaccaaacggcggctacgatttgttagcgaaaatgcgtcagcggcaggtgaatcatattttcgcgccaagagaaccggttatttaatcggtcgagtagttgtgttttagcgggataaaaaatttatttttattcttggatgaagcgtacagatttgcggatttacctaataaggtcttaacttaatactgtaatggacgctgtgaatagctaataatcactcagctgataaagcacagaccgtcaggtttattcaatatttggaggacgtatggggattctatcctggattatctttggtctcatcgccggtattctggctaagtggattatgccaggtaaagacggtggcggattctttatgaccatcattcttggtgtggtcggtgctttggtcggtggctatatcagtactttctttgggatgggcagagtagacggctttaacattggtagctttgtcgtcgcagttatcggtgccttggttgtgctgtttatctaccgtaaaattcgtagctgatttaacaagaaagactcatcttctctaaagaaaggtggcaatcacatgtcacctttctctcatcaaactatcatttctctgtaataaaaatatccgttaatggctcaaagataacctgcaatctgagagacattctatgggccaggcattacttcaatatgcgccagattatcctgatactgcaccggaaacgaaaaaaaaggttctggcggttaaaggattgatgaaagcctatgcatcgcagcataaggtgttggataacatcaattttgaactccatgctggagaatttgtagcgattattggccgctcaggcgcaggaaaatcaacgttacttcatatattgaatggcaccatttcttccagcggtggagagattcttaactatcaggagagtggggaaacgcaaaatattgcctcgctgacggccaaacaaatgcgtaaatggcgtgccaagtgtggaatgatttttcaggatttctgtctggttcctcgcctcgatgttatgaccaatgtgttactcggaagattaagtcatacctcaacgcttaaatcattttttaaaatatttgccgagcgtgaccgagccagagccgtcgagctcttgcagtggttgaatatgttgccacatgcgttgcagcgcgccgaaaatttatccggagggcaaatgcaacgcgtggctatttgtcgcgcgatgatgcaaaaccctaaaattctattggccgatgagcctgtagcctccctcgacccaaaaaataccacccgaataatgaatacgctgcaaaaaatcagtgaaaacgatattgcggtggtggtgaacttacattcggtggcattagttaaagattactgcacgcgagtgattggtattgcgcaaggaaaaattatatttgacggtcatcctgatcaactaagtgacagtattattcatgatatttacaacgatgaagcaacagatgttttgcattaatttccattaatcctctacggacataggttattttaatgaaaaaagtaatgagtgttacttcgttagtggcaggtgcgatgatggtatttaacgccacggcggcagatgcaccgaaagaaatcaatttgggtattctcggtggccaaaatgcaacacagcagattggcgataatatgtgtgtaaaagaatttttggacaaagaattaaaagtaaaaaccaatttgcataatgcttcggattattctggggtcattcaaggattactcggtggaaagattgatatggtgctgagtatgtcaccgtcatctttcgcctcggtttatattaaagaccctaaggccgtcgatttggtcggtattgtcgtcgatgataccgatcagtctcgcggctatcactctgtggtcgtggtgaaggcagacagcccttaccagaaaatggaggatttaaaggggcaagcctttggttttgccgacccggattcaacttcgggtttcctgatccctaatcagagctttaaacagaaattcggcggaacgccggacaataaatataacaatttcttctccagcgtgacgttctccggtggtcatgagcaagacatccttggcgttattaatggtcagtttgccggcgcggtaacctgggcatcaatgatcggcgattataataccggttatactagcggagctttcactcgcatgattcgtatggatcatcccgatttaatgaaacagattaggattatctggcagtctccgttaattcctaatggcccaattcttgttcgcagtgctttaccgccagcattcaaagcgcagttggttgcggctatcaaaaaactggataaagaagaccatgcctgttttatcaaagcggtagggggcaagcagcatattgaggaaacctcattgagcgaataccaaaccgtcattgatttgaagcgcgatctaactaaaggcgaccgttaagtcggttgatataatgaataggatagctcaggaacggaataccggagctatcggttttcaggcggtaagttattttgaatactgatttcaatcattattaccagcaggttcgcagtaagcaaaaacgcgaaaccttaatatggtctttagctctggttgtactctatttgggtgcaggcagtattgctgaatttaatcttcacaccgttctagtttcattcccacattttttttgactatctggctgaaacaattcctgtacttcactggccggttttatttgccgatgggcgtaccgaaggttcattggcatattggggctatcgcctgaatattcagctaccgctaatttgggagacgctacagcttgccattgccgcaaccattctctcggttattgtcgcctgtattttggcttttctggcggctaataacacccacagcccagcaccagtcagattagcgattcgtacctttgttgcatttttacgtaccatgccagaattagcttgggcagtcatgtttgttatggcttttggtattggcgcgattcccggttttttggctctggcgttacatacgataggtagcctgaccaaattattctatgagtctattgaaactgcctcaaataaacctgttcgcggtttgacagcttgtggtgctagtaaattgcaacgtatgcgttttggtctttggccgcaggtgaaacctatctttctgtcttacagctttatgcgattggaaattaattttcgccagtcaaccatactgggtttggtcggcgcgggcggaataggacaagagctaatgacgtctattaagttggatcgttatgatcaggtcagcatcacgctgttgctgattattaccgtggtttcattactagattacgcctccggaaaattacgtaaacgtgttgtggaaggagccgcttaatgatgacgaatacgctttcgccagccgatgtgatttctctgaagcagcaacatccgacccttttctcgcagcagcggcgctatcttcgcttggtcgttggcatcggcgtggccattgttttctattatattttcttctttaatttctttggtattccctggtctgccttcgttcacggcagccagcaaatagggcgctatttcctgagaatgtttgtctggcatgattttatcaactggccgtttaaatattactttggtcagatttttattactttagccattgtattcgccggtacgcttacagcgacgtttattgcgttgccactgtcctttcttgctgcccgtaatgtcatggatacgccggtattacgagttacctcttttgttgtgcgccgttttctcgatgtttttcgcggtatcgatatggcgatttgggggctgatttttgttcgtgccgtaggaatggggccgttagcgggggttctggccatttttatgcaggatatgggcttactgggtaaactctatgctgagggacacgaggcagtcgataaatcccctagccgtggattaactgcaatgggggccaacccattacaaaaacaccgctttggtattttcacccagtcgtttccaacttttctggcgcttagcctgtatcagatagagtctaatacccgttctgcggcagtgttaggttttgtcggtgctggcggtatcggtttggtttacgcagagaatatgcgtttatggaactgggatgtggtgatgtttattacgttgattatggtggttattgtgatggtgatggataaaatatctgccatgttgcgcaataaatacattattggcgaagagattagcccgtataaatcagactcaagagatctgtgcgttatcactaacgataagtaatttctgtttttataccagagcccaatcaggcgcatttttgtgtggttgggttctgatatgttattttactaatcagttgtcaatttatatttgtttttgtttaacgtttatttgtgattttgaataatgtcgttattttgtatttaataattacttgcttttttcacgattatatcaaattaaatttacattgagaaaaaaggattatctctatataatactgcccgccagacgttaaagaagcttttttgttattcttgcgacattcgcacacgtctattaaattaattggaatagggcagtaatatgatcaacaacgatgtgctccgcagtgttcgctatatgcttaatgttaacgatgctaaaatcgtagaaatcatcaagttaactgattttgaagtgaacagcgcggatgtcgttaatttccttaagaaagaagacgaagctggttaccagaattgtcctgatgaggtcatggctcattttcttaacggtctgatcttctttaagcgtggtaaggatgacaaattcccagctccgtctattgaagcacgtatcactaataatattgtgctgaaaaagctgcgcgtagccttcgagttgaaagataccgatatgcacgatatcttcacctccgttgattttccggtgtccaaacctgaattgaacgcgttgttccgtaaggacgacagcaaaaacttccgtccttgtggcgatcaggtgctgcgttacttcctgaagggcctgactctgcgggtgcgcggtcctaaaaaatagtcgttttaatatgacataatgataatggcgggcattggttcgccgttattgtatttttcactttttcactttttcactttttcactttttcactgtttaaagaataaattaatgaatgatgaattaaatggattttttatgattattattatttctaatgcggatttttattaaacttcattaaatttgatattcgtataaacgaatgttatttgctttttttcattaactaaattaattacccctgaactgttaactaaaatgtattttgatggccataatgttgaagttgatatctgcccagactttgtttgaggcgtttgttatctatccaaatccgcagtggccggatattaatccggccatttagattattaataatcgtagaggttatctggggctaacttcaatggggagaaaatctgatgcaccccattcggcccaggaaccgtcatataaagatacagaacgagcttttattgcgtgtaaccccaatgccagtaccgcagcggttacgccggaaccacagctaacaacgatcggtttttccagatcgacaccgttagattggaaaatatcccgcagaatctctggcgatttgagctggccttgctcaatcatctggccccagggaatattgatgctgccgggaatatgccctaatcgcaggccggggcgaggttccggttccgcgccagcaaaccgtggcgtcgggcgcgcgtccaggatctgcgtgtccggttcgtctatagcggcgagaacctgctcgtaatttttaacagatttctcgtttagcgtggcggtaaaccactgtggagccggattggctggcccgctttccagtggcaaaccggcttgtttccactgttcaataccgccttccagcacgcgaacgtcacgggcgccaaaagtgcgaaatgtccaccagcctcgcggggctgagaaaaggttgccatcgtcatacaacactatcgtgtgctgatcgttgatacccaatttacccattgcttcaccgaatgcttcggcgctgggcaacatgtgaggcagatcggtactgtggtcggaaacctcatcaatattaaagaaaaccgcaccggggatatggccttgctcaaactcggcttgaatatcgcgtttagggtttagccccggcggtgacagccgggcatccagaataaccacttgtttatcgtctaaatgttcagccagccagtgcgggctaaccagaaaagaagggttcatcgaaagtcacctgtccgtgggttaatgaaaatatttagcttacaactatatatctaaattgggcacagaggcttttctctcgtcactatctttccctattgcgcgttggctcgaatttttcccgttcccttggtagggattaatacgggcttatcagtagcgccgcgggggatttgtggtgaatggctatactgtatggttaggcgagtatgcatgccagccgagcgaggttgaaattcacccgtttcacgaccttggggctgactacccatcatgatgatagctgggagaagtggctaagtttgcgtaggtttaatggatagccgctgaagattaaacgaacgactaaggcaaataaagtcgacatagttattgatttgttaatagttattgggtcataaagaaccctgtaactcattaaaatccttcgatgataagaggcaaaccgatggcactaacccttacccttagacctgttatagcactggcaaccatcatgttaagcctgacgactggtctggcacaggcggcagatagcgtgcgtgtggggtctaaaatcgatactgaaggctcactgctgggcaatattattgtgcaggttctggaggccaataatattaaaaccaccaacaaatctcagttgggtacgaccaaagtggtgcgagcggcgatcagcgcgggtgaaattgatatttatcctgaatataccggcaacggtgcctttttcttctcaaatgaaaaagatccggcgtggaaaaacgctcaggccggttacgagaaagtcaaagcgctggattatgaaaaaaataagctggtctggctggatgcagcgccggcaaacaatacttggaccattgcggttcgtcaggatttagccagtcaaaataatcttaagacgctggctgatttaggcaaatggataagcgatggtggtcagttcaaactggcggcttcggcagaatttattgaacgcccagatgcgttacctgcgtttgagcaggcgtatggcttcaaattaaatcaggaccaactgctgtcgctggcgggaggcgatacggctgtcaccattaaagcggcggcggagcaaacctccggtgtgaatgcggctatggcttacggcactgacggcccagtggccgctttgggcttacaaacgctgactgaccctaaaggcgttcaaccgatttatgccccggcgccgattatccgcgaagcgacgctgaagcagcatcctgaaatttctgccgtgttgaatccggtttttgcaactcttgatggctcaaccctgcaaaaactgaatgcgcggattgccgtcgaaggacaggatgcgaagaaggttgccgcgagctatctaaaagagaaagggtttatcaaaggttaatcctcgtaatgaaatactgaccggcgacggattgcatctttagccggtcatggagactttttgtttatgttagtcaaaaaccgcgtgctgctggcgctggtgacgttgctgattttggcaggtgccgggcttccttttctcagccacgcgcagaatcggttgatttcagggcagggtattgccttcttgtctttattacatgggcctgtggggttagtgctgttgcccgttatcgctttgattgccctttctttcgtttcccctaaaccttggatttacgcggttattgtcctgatggcggagttgctgctattcggtttggtctggttggcgggatttactgcctttcagctttccggtggcgaagagagcctggttcgcacttcgctgagcggcgctttctggctaatggccggattaacctttctgattgccgtcgatagcctttccagagcaattaccagcccgctgtggcgtatgttagccagcgtgcaggtactcgcccctgtgattattctgttgtttatcggtcagttggatcaactgtcgctgatgaaggaatatgccaaccgacaggacgtcttcgctgatgccttctggcagcacctcggaattttgttggcgacagttattcctaccgttttgctgggaatcccgcttgggatgctgtgctttcgttcttatcgcctgaaaaccgctattttttccgtgctaaatatcatccagacggtgccttctattgcgttatttggtttgctgatcgcgccgctggcggggttagccgcagcctggccgtggctggcaaagctgggagtgagcgggatcggtctggctccggcaattattgcattggtactttatgccttgctgccgttggttcgcagcgtggttgccggattggaaagcgtaccggatagcgtgatggaatcggcgcggggaatggggatgaccggtagccaactgtttgttcgggtgcaaatcccgctggcgttgccgttgattctatcgggcattcgcattgtggcagtgcaaaccgtcgggttagcggtggttgcagccctgattggtgccggtggattaggcgctatcgtgtttcagggattattaagcagcgcattggatttggtgttgctgggcgttataccggtgatagtgatggccatcgttgttgattcactgtttaaatttatggtttcttttctggatgtgacccgccgatgattcatttttatcaggttagtaaatattttgccggcaaactggcggtagataatctctcactggatattgccaaaggggagtttaccgtcttgatcggcacttctggctcgggtaagtccacgacgttaaaaatgattaaccggctgatcgagcacgatgaagggcaaattcactttgccggtgaagaaattcaaaaattcaaacccgaagatttgcgccgtcggatgggctacgcgattcaatctatcggcctgtttccgcattggacggtagagcaaaatatcggcaccgttccgcaactgcttaaatggccgcgtgagaaaatccgccagcgggtcacggagttattgaatctgttgcaactggatgcggatcagttccgccaccgttatcctcatgagctttcgggtgggcaacagcagcgggttggggttgccagagcgttggctgccgacccggaagtgctgttgatggatgaacctttcggcgcgctggatccggtgactcgctcagcgttacagtttgaaattgcccgtatacaccaaatgtcaggccgaaccatagtgctggtaacccatgatattgacgaagccttgaatctggccgatcgcattgtgctattggatcaggggaaagtggtgcagcaaggcacgccaattcaaatgttgacgcagccggctaacgattttgtgcgtgatttctttggccggagcgatttggggatcaaactgttggcacttggttgggcggcgcagcgtatgagggttggggaaagcgtggcgggagagccgattttggcgtcaaccagcctgcgggaagcgctttcgctgtttgtctcacgtaaagccgatagattgcaggtgatcgatgaattatcacagcctctcggcgtgctctatttttccgatctgatcgccagtcaggagcagccatgacctcatctatttgccgttggctatggcgtagagttaccgatccattggttttggcaatattactactgctgggattggtatttggcatgccatcgctgcatggcctatttgccgcctggttccccaatctcgatcgccctatttatttacaggatacgttctggtcgttattggaagctcacgtgttgctggtgctgatttccagcctgatcgccgtgttttttggcgttgcaacaggcattgccgttacgcgtccggcagggaaggaatttcgttcggttgtagaaacggtggtggcgatagggcaaaccttcccgccggtggcagtgctagcgatagcggtgccggtgatggggtttagcgagaaaccggcaattattgcgttggtactctatgggttgctgccgatactgcaaggcacgttgacagggctggaatccgtgtctcaggccacccgtgaagtcgctcaaggcgtaggtatgagtgccaggcagattttgtggcgcgtagaattgccgctcgccgctccggttatcgtcgcggggattcgcacatcggtgatcatcaatattgggactgccgcaattgcttctacggtcggtaccaaaaccttaggttctccaatcattatcggtttaagtggttttaatactgcttatgttattcagggcgctttggttgtcgcgctgttagctatcattaccgatatgttgtttgaacgttggacgcgaaaactcgcggcctggcgcgagttacaatcggtatctccgtcgaataacccgtaattcaggcttgttatcttcagcgatacacaggagtttttggtgatcttcttaattgtattcggagtgcatcaaagtgacgctttgccattctggctgtgttgacgcaggcattgaatcgctcaggcgtgcatcagcgggccgatagcatgctttagccagaagagctattggtacattggcggcatccggactgccactagtttgctcggtaaatatatctagcgggtaattaaccttaattagacagggaattaaagcggccctaactgagccagcagcgtgagagaggctattgctgctggattttcacgtcacctctttctctgaatatacactgattaacgatatgtgaattatcgcggtcagacagggcttggcgaatttataacataaacaaaaataattaattaacggtattaatttgcttacttattaactgtagtcagttaaataaaaatcgtgtctgaaatcattaatgtctaacaccagggttgactcaaatatgatttatatcaattcgcttgattataattaatttttaatatgtttatttatacagcgtcgtttcatttattagaagaaatacagccattccctataattaaattaattgaagataactgtaaattcatgtatttacaaatacatacaaaaatatacaaacatttttttataaattacgtttcatcttacatctgattttattggttatgctcgaattacattcatattctattaatcaatggcttggctggtttataaagtcaaaaatattaattaattgtgatgagtatgttttaattcgtaatattaagtaatttattgatttaattcaattggttgtagttgactgattttctggttgattgtctattttttattaatgtttttttacgatttagataatttacgaattttttacctacctaattggttgttgcgtcatgtttttttgatcaggattaaaatttccttagaaaatttattttctttctttataaattttatcgtctatctttaaatacgcatgcggttattactcattatttcatcccattcctaggggtttgtaaggattacctatgtctacagatgatcaaaaggtgggcctcattcctgtcaccttgatggtagcaggcaatataatgggctctggcgtttttcttttacctgctaacttggcttcaacgggcggaatagctatttggggatggttggtcactattattggtgcgctagcactttcgatggtttacgcaaaaatgtcatccttagatgatagtcccggtggttcctatgcctatgcacgtcgcgcatttgggccatttttagggtatcagaccaacgtactttattggttggcctgctggattgggaatattgctatggtggtaattggggtcggttacctcagttattttttcccaatcttaaaagaacctatggtattaaccatcacttgcgtagtgatcctgtggatatttgttgggctgaatatcgtcggtcctaaaatgattacgcgggttcaggctgttgccacctcattggcattaatcccaattgttggggttgcgctgtttggctggttctggttcaaaggcgagacctacatggaggcatggaacgtcagcggactagggactttcagcgcgattcaaagcactttaaacgtgactttgtggtcatttattggggtcgaaaccgcctctgtagccgctggggtagttaaaaatcctaaacgcaacgtacctattgctaccgtcggtggcgtattgatcgccgcggtatgttacgtcctgtccagtaccgccattatggggatgatcccgaacgccgcgctgcgtgtttctgcctcgcctttcggtgatgcggctcgtttagcattgggtgataccgcgggtgccgtggtttccctgtgtgctgcagccggttgtctaggctcactggggggctggacgctggtagccggtcaaaccgccaaagcggcggcggatgacggcctgttcccgccgattttcggtaaggtcaataaagccggtacgccggtagccgggttgcttattcttggcgtattaatgactatcttccaaatcagcagcatttcgccaaacgcggcgaaagagtttggtctggtctcttctgtttcggtcatattcactttggtgccttatatctatacctgtgcggccttgctactactggggcacgggcatttgggcaaacagatcaagacctatgtcgccattaccatggttgcgtttgtgtactgtatttgggctgtggtgggctccggtgcagaagaagtgatgtggtcatttgtggtgctgatggttatcactgcgctttatacatttaactataaccgtacccacaaaaacccgttcccgctggatgctccattggataaaagcaattaattcatcaccccgcgccgaaaggggcggggaagcataaatctgatgttttggtcttataacaaggacaactacgatgattgatttaagtcgtcacaaaaaacgcaacgttttggtggtggacagtaatattctcgaagccaataccgcgaatggacgagccgttaacgaactgattgaagccctgagggacattaatttcaatgttattgccgccgcgacctttgaagacggtatcgctacggtcgcttcagactcttctttgtgttgtatttttgttgattggacatccggtggcaatgacgatgcctcccacagccaggcttccgagctactaaaagaaattcgccgccgcaataaggatgtgccggtattactgatggcagagcattcttgtattaatagccttagcctggaaaccatgcgattggtgaatgaatttgtctggatgcatgaagataccgctgaatttattgccgctcgcgcccatgcgctgatcgtaaaatattatgaacagctgctgccgccgtttaccaaagcactctttaaatataccgaagataaccctgaatactcttgggccgctcccggacatcagggcggggtagcattcagtaaaacggctgtaggccgcgaattcctcgatttcttcggtgaaaacctgttccgtaccgatacgggtatcgaacgtgaatcattgggttcgctgctggatcacagcggcccgatcaaagattcagaagcttacgccgcccgcgttttcggggcgcatatgagctattccatgctgaacgggacctctggttctaaccgtgcgattatggcggcggtagtgggagataaagaagttgctctgtgtgaccgtaactgtcacaaatccatcgagcaaggattggtcatgaccggcgcgctgccggtgttctttattcctacacgtaaccgctacggtattatcgggccgattcccaagtctcaattcaagccggagtctatccagcaaaaaattgagcaaaacccattgaaatcacaggctaacagtacaaaaccagtctatgccgtagttactaactgtacctatgacggtatgtgctacaacgctaaacaggcgcaggatctgctggcggaaagtgttgatcagattcattttgatgaagcctggtatgcttatgcccgcttcaatccaatgtatcgggatcgccacgcgatgcgcggtaatccggcggatcacgatcccgacggtccaacggtgtttgcgacccaatcaacccataaactgttggcggcgctgtctcaggcttcttatatccacgtgcgtaacggtaagaaaccgattgagcattctcgttttaacgagtcttacatgctgcaatcgaccacttctccgctgtacgccattattgccgcgaacgaagttggcgcagcgatgatggacggcgagcaaggacacgctttgacgcaggaagtgattaacgaagcggtcgattttcgtctggcgctggccagagcccatgatactttcgctaagcaaggggaatggttcttcaagccgtggaacgcaccggaaattaccgatgctaaaacgggtaagaaagtgccgtttgcgcaggcatctcgcgagcagctggcaacggacccgtcttgttgggttttgaaaccgggggaaaactggcacggctttgatcaattggaagacgattggtgcatgttggacccaattaaagccggcattatggtgccgggcatgggtgacgacggcaaaatgctggacaaagggattccagcggcggtggtaacggcctacctcggtcagaaagggattgtcccttcacggaccaccgattttatggtgctgtgcctgttctcagtcggcgtaaccaaagggaaatggggaacgttaatcaacgtattactggaattcaaacagcactacgatgacaacacgccaattgccctgtgtctgccggatttggcgaaaaactacccgcagcaatatggaaaaatggggctgaaagacctgtgtgacgacatgttcgcccacatgaaaaccagcgaaatggataaattgcaatctgaagctttcagtaacttacctaaaccggttactttgccgcgtaaagcattccaggatcatatggcaggtcggtgtgaattgctgccgattgatcaattggcgggtcgtatttcagcggttggggttattccttaccctccgggcatccctatcatcatgccgggggaaagctttggttctaacgatgagccttggctgcgctatatccagagcatcgcggaatggggtgaaaaattcccaggtttcgagaaaattctggaaggctccgagcagaaagacggtaaatactctatttgggtactgaataaataatatttgggtactgaataagtcattaccgatcgtcaaaccgcagagagaattctgtttgtggtattaaagggcaaagagcgatggacgcgcactttgcccttttggcgtttaacggtctgacaaagttaagaaatatttatgattgacagggcgttataatttggacaaaggcaatgcagacgttgttaaggaactgaaagagtaactgagggttgatctgtctattcgctgtgcccccctccgctcgcaggtggttgaatgggggaggggctaacagtctttttacagcagcgatgcatgatgaatagagtagtgattaaggctgcttttgaccggcgttagacatcccggccggcgcgatgtcacccagcggagagtgtaccgtttcggtttcctgcggcgtggttgaacgggtatacatgttcagacccgccaggaatacgccgcccagagaactcagagccatcaccgcaaacagggcgatcagtaatttcttctgcatagttatattttcactttttatcgaaacagcaggaattatagacggttcccttagcgaaacaagggcgcggcttttaacgcttaccaattaaaaacttgcccaatgttatcaatacgaccgccgagacaataaccgccagtgccagccactcggttagagacagactctcgccggcaaatccgatgcccaacaatactgccaccaccgggttaacgtaggcatagctggtcgccaccgccggagggacgtttttcagcaggaacatataagcgctaatggccagcattgagccgaatacaatcaggtacatcaatgccagaattccgctggtggtcggcggttgcgtcagtttttctccgcttaaggttgagcccagcagtaatactacgccagcaactaacatttgagccgcgccagacatcgcgcctgcgggtaatgccagtttggaactccagatcgaaccaaaggcccagctcgccgaagccagtagaatcatcagcgcgccggtaggatttcccagtaaattgctgccagtattcagcaaaatgataccaaccagtcccagcccaatgccagcccactccagtttggtattcttcatgccccacagcatactaaaacacagggtaaatagcggaacggtggcgaccataaccgccgcgataccggaaggaacgtgctgatgttcagcaatagtcaccagcccgttaccaatggctaatagcaaaattccgatggcgctggccgccagccattggcgtggtgtgggtaactgatggccgcgaatagccagaaaactgaacagaataatccccgccaccagataacgaatcccggccatcatcaacggaggccagctttctacgccaatacgaatcaccagataggtagatccccagacgaaatacagcgtgaaaagcgcaccaattaacggccacgggttacggctagtttgctttagcatgattcttcaacaggtaaggacgggaaagagtggtttagtaaacatgatctggctgatgataagcaaaggattaaatctgttttttgccccattatctatggggataaactccccgcaatcaataggtctttatctatcgtatttttggcgtcaatggattgaggatatttggacacatttaaaccaatgaaaatttttttctgatatagcatgctgaataaatcagcattttcagttattggtttggagtcccgcttgagaatattgaacattcgagggtcagtgccaggtattctggggctggcgatgacttacgggttgctaagccatagcgcagccgccagcccaccctatgcatttttatctactgaagatctccagaagaatcggcagcttattactgagcagcaggcgccggaactcactcaagaagcgtattcccagctaattcgacaggcggataaggcgttagcgcgggaaaatatgagcgtgatggataaacgcatgacgccacccagcggttctaaacatgattatctcagtctgagcgcctattggtggccggacagccagcgccctgacggtttaccctgggttcgtcaggacggcgacattaatccggccagtaaaaatgaggacagcgacggcgttcggctggcggacttcaccgcgcaggtgcaggctctgacactagcctggtatttctccggtcagcaaaaatatgcggataaagctgtcgggatgatccgagcgtggtttttggtaccggctacgcggatgaacccaaatcttaattttgctcaaggcgttcccggcgtggcagaagggagaggttctggtgtgctggacggacgttatttcgctatccgagtcgtggattcgctgatcatgctgcgtaaaaatccgagctggacggcgcaggatgaacaacaaatgcatcagtggatgacggattatttatattggttgcaaaccagcccgttgggaaaaaaagaggcggcggctaaaaacaatcacggcagttggtacaaagtgcaggttgccggaattgcctggtatttgcagcgtgacgacttggtgttggacatggccgaacagatgaagccgctgctgaattatcagttggaagccaatggcgcacagccgttggagttggctcgaacgcgttctttccattatagcgactttaatttacaggcagtgacgcaactggctacgctggcgaacaacctgcatttggatttatggcgctaccaaacgcctaacggcagcgggttactgaaagcgctggattttatggcaccttatatcgataaaaacctagattggccttatcccacgcgggatcgctttggcattcggttgatacctttattgagtcaggcggacaaagcgttgggccaacctcgttatcagcattggatcgctctgggcagtttcagccccccgacaggaaaatctgtagccaaggctcgtggggcggtgaacggggctttacgagataactggctgctccaggctcccgagacgcgttaatgttgtgtatgaatgagattaacatataaaaaagccgggaattaatcccggcgaatgacctgaaaaatacttcatataaaatgagggtaatgctttacagaagacttagaactgataaaccaaaccgacggcaacgatatcgtcattattcagtttcagtttattgtcgttgctcaactggttaattttataatctacgtaagtagacatgtttttattgaagaagtaataagcgcctacatcaatatatttaaccaaatcgacatcgcctagaccttcaatatctttaccttttgactgaacataggccagagaaggtttcagaccgaaatcgaactgatattgagccactaattcaaagttttgtgctttatttgcaaagccgctcactgatgttggggtgttattaatactggccgtaccggaaattggcgtcatattacgggtttcggcataggttgccgccagataaacgccgttatcatcatatttcagccccgtggcgaaggcttcagctttatcgcctttaccgaatgtgccagccttctgagcggttgtgcggttggaggaggtatacgcggcaccgatgctaacgcctgatccaatttcatagctggacgccagaccaaagccgtcgccgttctgtttcgaagtcccgcgggaagtatcgtcgtttttgccttgatattgcaggctaaatttcagaccgtccaccagaccgaagaaatcgctgttacgataagtggcaacgccattggtgcggccagtcatgaagttatcggtttttacatagctgtcgccaccgaattccggcagcatatcggtccacgcgccgatatcgtataacacgccgtagttacggccatagtcgaaagaacccaatccggcgtagcgcaaaccggcaaagcctaagcgggttttggtatcggcggtgccttcgctttccgcgtggttaaccgcaacatgatattcccactgaccgtagccggaaagtttgtcattaatttgggtgacgcctttaaagccaaaacgaacgtaagatttatcaccatcattacttttactgtcagaaaaataatgcaaaccttttacttttccgtataagtcgagtttattgccgtctttattataaacttccgcagcgtgtgaagtagtggcaattaaaagcgccggtattaacattgccagaatattaattttcatgtttttgccctgttttcttcattgaaagatgccaatcatcaaagtttttgctgtattcaatatctgtctgaactttctcagcgcagaatttttaccgcatctgtgtgatgtatttatgacaaagtgaatttaaggatgagataataaaaaataattgataatcagcggtgaaggcgctgaattattctacgcattcgcggtcccgaataggctgacgtgagcggcgcactgtgggacaatagggcaacattcagtttagataagatatgcatggcgttatcccccgcagtaaaagatcaaatcagccagtggtataaggcccttgggcaacagattccggactttgtttctcgcgctccgcagcgtcaaatgatagctgaagtggcgaaaacgctggccggcgatgccggacgacatttggctatcgaagccccaaccggcgtggggaagaccttgtcgtacctgattcccggtattgcgatcggccgcgcggaaaccaagccgctggtggtgagcaccgctaacgtggcgctgcaggatcagatttacagcaaggatttgccgttactgaaaaaaattattcccgatttgaaatttaccggcgcatttgggcgcggacgctatgtttgcccgcgaaatctggccgccatgtgtaccgatgtctctggccagggcgatttatcgctgtttttgggcgatgagctggcgccagccaacggcgaggagcaggcaacctgcgtgggcctgtctaaagcgttgagcagccacgtttgggatgggctgcgcgatcatcatcaacaatctatcagcgattctctgtggggcaagctcagcactgataaagccaactgcttagggcgcaactgtcattattttcgtgaatgtccgttctatattgcgcgtaaagagatcgaaaccgccgatgtggtggtagccaaccatgctttggtcatggcggcgctggaaactgaatcggtattaccgaatccaaaagaattattattggtgctagatgaggggcatcacctgccagatgtggcgcgggatgcgttggagatcgaaggtgagatcaccgccgtttttgccaatatgcagttggatatgattgcccgcctggtggatcagtgcatggtgcaatatcggccgaaaaacccgcctaaactggctaattcggaacggttaaaagatcactgcgagcagatgcgggagctgattctgaacgtagaacaacaggttagccaattgcttcctacggatagtattcaagctacttatcgttttgaaatgggcatcctgccggaaagcctgacagaaagctgcgccaaattatttaagttaaccgatgcactacgcggtttagccgagtttgttcttaatgatttaaccgaacaaaccggtaagcacgatatcgtgcggctgcatcgggcgattttacagatgagccgtaccttcggttatctggaggcaatgaccaaactgtggcgtctggccgcaatggataaagcttcaaatgcgcctatttctaaatgggttacgcgggaatatcgcgaaaatcaaactcatctgtccttccactgcgtggggattcgcgtgagtgatcagttagataaaatgctgtggcgcaaagtcccccatgtcattgtgacgtcggctacgctgcgttccctcaacagctttgctcgcctacaggaactctctggtttgagcgaaaagaccggggatcgttttgtggcgctttcctccccgtttaaccacgttgagcagggcaagctggttattcccaaaatgcgcgtcgaaccgacgatggcgaacgaagcggagcatttggccgaaatggcgcagtatttccgagccgaacaggccagcggtcgccataaaggtatgttgattttgtttagcagccatcgggcgatgcaaacctttctgagccacatcaccgatctgcgtttaatgctgctggttcaaggtgatcagccgcgctaccggttggttgaagagcatcgtaaacgggtgacaaaaggcacgcccagcgtactcatcggtttgcaatccttcgcggaaggcctggatctgaaaggggagttactgacgcaggtgcatatccataagattgcatttccgccgattgatagcccggtgattttgacggaaggagaatggctgaaatcattaaaacgctatccgtttgaagtgcaaagtttacctagcgcttcatttaacctgattcagcaggtggggcgcttgatccgcagtaatgagtgccacggcgaaattgtcatttatgatcgccgtttactgaccaaaggctacggctcacgcttattggcggcgttgcccgttttccctattgaacagccggagatgccagaggcggtagcggtgcctattgcggcgaaaaaaacctcggttaaagcagcgactacgcgaaaaaaagcccctaaacgtcgccgcacggacgttacgttgggcagctaacgacgtggtgaaaaataagcgaatggcagtgagcaattcattgccatttttatttgtagccaggcatttcaaacggtttcacgcaattctctttcacctcaaaaaaatccgtggctaagattaaattagccgcaggtcagttaactcttatttgccaactcatacgagttaagtctgggcgtacctccggcagtggcgtagttcagcttccagcccattttaagggtctatccggcgtctgaggtaagcagcatgaaacaggttatggcagagtttatcggtactttctggttagttttggggggctgcggtagtgcggtgttggcggctatgtttccagtggcgggaatcggttttctgggcgtcgcattggcgtttggtttaaccgtcgtcactatggcttatgctttgggccacgtctccggcgggcattttaatccagcggtgtcgctggggctctgggtgggtgggcgattttccggcgcgcagttgattccctatattattgcgcaggttctggggggattagccggtgccacggtattgtatcttatcgccagtggtaaggccggattcgacgtcaccgcaggctttgccagcaatggttacggcgtgcgttctccggggggctacagtttgcaatcggtgttgattgccgaagtgattctgacaatggggtttgtgatggtgattatgggcgcgacggattcccgttcacccgccgcggcagcgccgttagccataggtttatgtttaaccttaatccatttgatctctattccggtggataatacctcggttaatccagcgcgaagtactggagtggccatttttgccggtggaattgccttacagcagctttgggtattctggttagcgccgctgataggcggtgctttgggcggtggcctttaccgtgcgttgtttagccctacggcgtcgaagacctgattctaattatccgctccccgcgacgccgattgggctgcgggggcgttttcctcgcgcggccagcaacaaaatctccaaagttttaccgcttatccaaccccacaggccgccatgattgatacctgacagtaaaatggccagcacgctaatcagcaatagtagacagataatatccaatctctgctggcctgtatcaaggagcaattcgcatactttgccccgacagccggcaaagctcagtaaaatcagcgctaaattgagtaaaaatacccaacgccagcctaaggtgctaacccgtattctgcccaccaccggcccaatcgcccatcccggctcgtttacgcccaacaaagtgcctatctctggtgcgggcttgtttcgggaaaggcggccatcaggctgaccgttacgtataaagtacaacccagattgctcactgtaataagcgaaagagattcatcatccaaatgctatcggccaggccagcgcttggtaatgataagccaaacagcggcatccccagataaagtatccgatagcgagcgtagcgacccgcggtgaccataaaagcgcagagtgccatcaggaacaataaaacgcctcactgtaggttttccgtgctggcggaaaatgcctgttgaatggcgggaaccgcggtattgacgatagtcaaatcgatacaacctaaagaactggccagactgataccggtcagcatgagagcctattgtcgacgggtcagaggtaaatccgaagtgagcgctgaggacataggcataatccgggaagaagaaaccctcacggtgtagtggctagttaagtgactcagttgcgccattttttctttttatagcggaattaaattctccaatggggtatcaatcagtacagatttatttaagatgggtgatattcattgggctttgataaggagaaagtgatgatttccggcgatcgtttgcacggcatacgagcttttgtccaggcggcgcaggctggcagttttagccgtgctgcagaacagcttggtttatcccgctcagcggtgggtaaagcagtggcgcggctagaatcccgcctgtcggtgcgtttgtttcagcgcaccactcgtagcctctctctcaccgacgaagggcagattttctatgaggattgcgtaaaagcgctggatgcgctggacgccgcagagattcagttggcggcgcgagccgtggctcccagcgggcgcttgcgcgtgtcattgccgatattgttcggccagcagtgggtgatgtcgccgttgctcgaattagccgacagttttcccgcgctacagctggaaattttgttttccaatcgcacagtggattttgcggaggaaggcgtcgatctggctgtgcgtattgggcatattggtgatgttgccgggttggcggcgcgaaaactgggagaacaacagtgggtgttgtgcgccagtgctgattacttagctacctatggtcatcccacttccatttcggatttagcgcatcatcgcacgattagtttgttacgaaatggtcgcagccaaacgtggcgtttagtgaatgacgcaggcaaaaccgaatctataacgccagccagtcgtttacgattggataatatggcggcggtagccacggctgcggaagcggggcacggtatcgcactactgccgcgctggctcgtcaaccctgcgctgcaaagcggtcgattgatggaaaccttgccaggcaacactggcgccggttcaccgattaatattgtctggctaaaagggcaggtgatgcccgcgcggattcgggcggcgattgataggctggtggaggcatttacaccgcaggctccctgggagtaagtgagccggttttagccggatcaaacctgagttatgctaaacaaaatagcgagaggaagcctttgttgatggattaccgcaaaattatcaaagaagtaggacgtggcaaaaatcacgcccgcgatttggatcagcagacagcctgtgagctttatcaacgaatgctggcggggcaggtgcctgaactggagctggggggcattctgattgcttttcgtatcaaaggggaatcggaggaggaaatcctcggtttttatcaggctatgcaacagcaagtgatggcgctacaggctcctgaaggtcggccaatgccggtggtgatccccagctataacggtgcgcgtaaacaggctaatttgacaccgcttctggcgttactgttgtcgcgtttagggctgccggtggtcgtacacggcgtgaccgaagatagcactcgcgtgaccagcgctgagatttttcaggcgctaggcatgccttggtctgagacaaaagaagatgctcaaactcggttggataacggccagccggtatttattccggtatctgcattttccccagagttagattgtcagctacaaatgcgctggcgtatgggggtgcgtaatagcagccataccttggcaaaactggcgacgccatttctgcatcagcgagcgctgcgtttggccagcgtttcgcatccagaatatatgcaaaaggtcggtcgattctttcaggctattggcgcgccggcgttgctgctacagggaactgaaggggaagtttacgctaatccgctgcgctgcccaccgctccacgcgatcgttggcggtgagcaaagagtcttgctggagcgtgcagaagaaagcggcgtgcctgatctacctgtatccaaagatgcagcagaaactgcccgctggattgaacgctgtctggctggcgaggtgctggttccgttgtcgatcctcaagcagttagcctgctgtcaggttattgccgggcaggcaatatcggtagagcaggcattgcggcaatttgctgctaaataatccggttttcacagaataaactgcgcggtttccgccagtcttggtcctgattggcttcccgctggcatcaggtcggtgagggcttttagcgtgataaccctatcaatgatggaaggaatcctatgcaacaggctttgagttatttcaacgcgttgaatcaagattatctggcagtgcatcaggccaaagaagacctgttttggcagaattacatgggtttgggggatgccgacgttgggaagcaattctcggcggcggagacggcatacaaaaggtttattgcggaaagtcgccgtttaaaagagctgcgtgagctgattacggcattagaagcccagccaaaaacgccggaaaatcaggatttgcttcacgggctgcggggctggtatcgcttttttgactgtaatgccattgaagatcctcaggcgcaggctttgctagatgaaattattgccttcgagtccgatctttatcagcggcgcaaaactcaccagccaatgcattttaatgctaaaggtgaaaaagtcgcggcttccctgggcgagttgctgaccaatcaggctactaatgaaaatgaaacttaccgacaaagttctcagcaggcgctgcgcgaagtagagcaatggctgttgcacaacggcttgcctgagttgattatcttgcgtaaccgatttgctcgccagatggggtatcgtaactattttgactataaagttaataaaaccgaacagatgatgccggaacaactgtttgccattctggatacttttgaacagcaaactcgtgaagcgaaccgccgtagcctgcaacaactggcggaaaaacaaggggagtctgcattagaagcttggaatatccgttttgccagcgctggagacgtcactcgtcagctcgatccttattttccttttgccgaatcattagatcgctggatcaacagttttaagcgcctgcacattggttttcgcggcgcggagatgaatttggatttactggttcgcgctggaaaatatgaaaatggttttatgcatggcccggtgccgccatttgttcagcagggtaaatggataccggcgcggatcaattttaccagtttggcgaaacccgatcaggtgggaagtggagcttcaggtttgaatacgctgttccatgaaggcggccacgcggcgcattttgctaatattgtgcaaaatgcgccttgtttctcgcaggaatttccaccgacctcaatggcttatgcagaaactcagtcgatgttctgcgatagcctgctggacgatgcggattggttaaaacgttacgctaaaaatgctgccggtgaaccgctgccagatgaattgattcgcgacaatattgaatccaagcaaccgatgcgcgcattcaatgagcgtcatattttactggtgccttactttgagtgggctttgtatcaatgggatgacgtgcagctaacgccgcaggcaattacccagctggcgcgagatattgagcaaaagattctgggtattaacgccagcccaaggccaacgctggcgattcctcatttattatcaatggaatcggcctgctcctatcagggttatctattggcgttgatggcggtagagcaaacgcgtgccttcttcctgcaacgtgacggctatttaaccgataacccggcaattggctcggatctggcggaacattactggcgtcccggtaatagcgttagccatgatgaaaccttacggagtttgactggcgaaggatttaatcctgcttatctggcggcggcctgcaatcaaacggttgagcaagcgtgggcagccgcgcaggacgctattgccagcgcggcgcagcggccacagccagcggctgattttgatctgaatgtcagtattcgagtggtcgatggtgaacgtgtgctggctgataatcagcatggggacgaagcgatgtgtcgcgctttcgccaatgctattaatgccttgtaatcaacagaatagatcgaaaaatgcccatcagggggtgctgatggacattttcgaacggctgaggaatattagtgataaatcactgcggtgccgtgcatcaggttgttaccggttgcagaagtaatggtgaaggctttagcgccagcagcatcagctttttcagctaactgtgctttcaggctgctcaggtcagttgcgccgctaacggaaatgacgcctgctttctggtactgagccgcgtcctgtctattaacgtgttcagcggcaacgctggcaaatgaaagggtagttagagcgagaactgcaacaaagtttttgatgtttttcatgatgtaatcctatccgatttcgttagagtgaaagggcgtttcctttcgatagaagctatgttacgcctctgtgatatttatgaaaccggatagaattgagaatctaattcaatttttatgaacaaaaactaacgtgcggcgaccccctgcggacgcagcatatcaaagcgctgctcttcggtgacgccataataagcactcggcccgcctcctcgcagaataggctgcgccgccgtggtcagataggtgccgttactgtctagcaattgacgattaatatgcaccgcaatcacttctcctagcaccagccagctattggtattgctgccgtcggcggcctttaactgaatgcattgcgtgagtttacattcaaagttcaccggactttccgcgacgcgatctacggcgattaaccggctgggttgcggcgttaaaccggcaaactggaattcatcctgctcccgcgagagcggggcggagctgttattcatcgcctctgctaactggcgggtggccagattccagacgaactcgccggtttccacaatattagccacgctgtctttccaaccgttgctggaaaaaccgatgataggtggcgtatagctaaagcagttaaaaaagctgtaaggagccagattacgctggcctttggcgctaacagaggaaatccagccgataggtcgtgggccgataatggcgtttaatgggtcgtggggcaggccgtggccgctggcgggctcataatagtaatcgtcttcggtactcataacatccctacatcaggtttatcataagaagtcagcttagtggctaaacggaatttcgcgcactctcgctggaaaattaacaggttattggcggcctgttttgtcactcgcccgttttaaggcgatttatgctatcttacgcgccagaaaatgcctatcagagactgaagacgatggaaaacaaaaaaaatctttcccaaagaaaaaagcggattacatccccgaaatcgccatcgttcccgctacgattttgatgcgctttcagccagttgccctgaattaagcgcatttttggctccgaacgcttacggtgatatttccgtggattttgccgatcccgcggcggtaaaaatgttaaaccgggcgctgttaaaacatttctacggcattgaattctgggatattcctgcagattatctttgcccaccgattccagggcgtgcagattatctgcatcatttggccgatttgttggctagctgcaatggcggcgtgattcctcaggggaaaagcgtggcggtattagatgtcggcgtgggggccaactgtatttatccaattatcggtcagcgtgagtacggctggcgctttaccggtacggaaatcgatccgcatgcgctgaacgcggcgaaaatggtggtatcgatgaacccgaccctgagaaatacgctacgtctgaaattgcaaaagcagcctcaagctatcttcgaaggcgtttgggcagttaacgaacgttatgacgtcaccctgtgtaaccctccgttccacggttctgcggaagaagctgcggcgacaactcgccgtaaattgcacaaattgggcaaaggtgaagtggcggctaagccggtgcagaactttggcggcaagaatagcgaactgtggtgcgagggcggcgaagagggttttgtcactcgcatggtgcaagaaagcgtcgcgaggggcaataattgcctgtggttcacttcattggtatcgaaaaaaaccagcctaccagcgatttatcacgctttacgctacgctaaggcggtagaggttcgcactattgatatggcgcaagggcaaaaagtcagccgttttgtggcctggacatttcagactgaagagcaacaggcggcctgggtggctgaacgctggtaacgtagcctgctattcggttgaatataattggttgaaagtattgattaaaagtattaaatcaactcttggctcggcggcaacggtagcgttatctgccaaatgttgtcgggccctattttatttctgcgatctcccactttttgctttattcacccgcctttccagccatttcatcaaaagtaatcacagtctttatccggttattgtgtcgagcagttaacaatatcattactttgttctacgcttagaggataaatacccgacgggcaatatagcctgctaataatcatacaaattacaaaatttttcgttgtgactttctctgattttacagcaatgtctcattctcccagggtgaagactaaagcctgcggaggacatttttaatgttcttcgggctttggcatgttttttgtaaaaaggcatgttgataaagataaggcctcggcttattcattattcgccataaggactctcagctatgttcttaaatttacgatcttctcatgcgccctggcgttccgaattaacctcgatagatagcgcagtaccgatgattatatttaagccagatgggacggtaatacaggcaaatcagttatttctacaggcaatgggatatcagcgtgaagagataataggcaagcatcatcgaatattttgcgatcccaattatgtcgcaagcgaagcctatcaacgccactggcagatattaaatcagggaaagccgatcaccgataatattaaacgtattcgcaaagatggctcggtggtctggttgcaggggacttacacgccagtgctggataggctggggaaagtggtggagataatcaagattgccagcgatgtcaccgagcgaattttacagtctcaagagcaccaaagtctgctaaaagccctaaatcgttcaatgggcatgataactttcacgcccgcaggcattattctggatgccaacgataatctattaaatatcatcggttactctcttcgggatattcagcataaaccccatcagattctctgtaagcctgagtttgcccatagcgacgaatatcgccagcattggcagcgtttggcgcgtggcgaatttattgtcggccgctttgaacgtatgaatagccgtggagaagatgtctggctggaggccagctataacccgattatggatcacgatgggcaggtgataaaggtggttaaaattgctcaggatattactcaactgattcaacagcagcagcatgaagaagcgctgatgcgcaacgtacatcatctttcagtcaataccgataagtcagcgtccgaaggggcaaatattgtccagcaggcggtaaaaggcatgctggaagtggaatccattgcccgcgaaacttcggacgtagtcagcgacttagggcgctgttccaaggagatcggcaccattgtagagtccattcgtaagatatcctctcaaactaatttgctggcgattaatgcttccattgaggctgcccatgcgggagagcatggcaaaggattttccgtggtggccagtgaggtgcgtttgctagcggatcaatctcgtcaagctgccactgaaatcgaacatatgaccaaaacgattcagaacggagtgaccgcggcgattaaaggtatgggaacctgcgtggaacaagctggcggcggcgtggcgctcactcaggatgcgggggaagtgattaatcaggtcaatattggtatgcaggatgtggtgaagctgatggcggcgttcgcgcagataaaaaaccggcaaagttatagcggtagttaattgagaaaaattaatagcgtaaacgttaatgcgataaacggggataagaaatcgtgaaatacccagcgggagccagtagccgcccgctgggtagggttatcaggaaacgtgctgcaagaactcacgtagcctgtcgcttggcggattggagatcaacgtatcaggatcgccatcctcagccacgcggcctttatcaataaagatcaggcgtgaggccactttctgtgcaaagcccacttcgtgggtgacgatgaccatggtcatgccttcttcggccaaatctttcattacggtcaacacttcatgacgtaattccggatccagtgccgaggttggctcatcaaacagcatcagtttgggcttaaccgccagcgcgcgggcgatagccacacgctgttgctggccgccagacagttcggctgggtaatggtgcgccctctcggacaaccctacttttgccaacagggctcgcgcctgtttttctgcttcagccttactggctccacgcacccgaatcgggccaaaagccacgttttccagcgcggttaagtgagggaacagataaaactgctggaacaccattccggcttcctgacgaatcagacgctcatcgactttggggtcgttaacatccaaaccatcgacaatcagttggccttttgtgatgacttccagcttgttgatgcagcgcagcaacgtggatttacctgagcctgatggcccgataatcaccaccacttctcccttggtgatattcaaattgatatcgtgcagcacctgggtttggccaaagtgtttggagacattcttgaattcaatcatattattttcagttttctttctaaccgacgcaggacgaagctcagcgccagcgtgataatcaggtaaatcaccgcaacagccgtccagatttccatggcgcggaagttaccggcgataatctcctgaccctggcgagtcagttcggctacaccgatcacgataaacagtgaggtgtccttgatgctaacaatccattggttgcccagcggtggcaacatgcgacgcaatgccagaggggcaataacgtaacgcagggtatcgcgtttggataaacccagagccaaaccggcttcacggaaaccattgtggattgacagcactgcaccgcgggtaatttccgcgatataggcgccggagttgataatgatggtgactaccgccgccgagaaaggatcgatgcgtaccggcatcatcattggcaaagcaaaatagataaacatcacctgtacaacgataggtgtaccgcgaatcaactcaataaaaactaatgcaatatttctacttaaccaaccaccgtaagcacgggcaaaaccggctacaaccccaattatcaggccgccaagtaaacccaggaccgagatccatagggttaacttagcgccttcaagcaggattggtatggcgggccaaatagcgctccattcaaactgcatggatattctcctggtctaaaaacggcaaaaattaattacttaggttcaacaccaaaccattttttatagatttcgttgtaagtgccgttctctttcaatgttttcagtgcagcatttaccttcacgcgcaattcgctgccctgtgggaaggcgataccgtattgctgagctttgatggaatcacccaccgctttaaactggccattgccggcagttttaatgaaataaaggatgtttggcgtgtcatgcaaaactgcatccgcgcggccagtacctaattccaggtaggcgttgtcaatgttagggaactgacgcagatctttggttttgatgttggctttcgcgtaatcaacagagccggtgccgcttttcactgcaacaactttgcctttcaggtcggcttcgcctttgatgtcattattggtggtttttaccatgaccagcaggccactgttgtaataaccatcagagaaatcaacggcttttttgcgctcgtccgtaatggtgataccggctagtgccaaatcaacgttcttggtttgcaaagcaggaatgatgccgctgaaatccatgggtttcagctcataatccagattcagctctttggcaatggcggcccaaaggtcaacatcaaaaccaacgtatttatccccttgtttaaattcgaaaggaacgaaagcggtatccgtggcaacaatcagtttgtccgctgcgtgagaacttattgcaaaggccagagtgattgcggccaatgaaacttttacaagtgacttcatatgtgggagttcctttgtactttgagtggaggagatccgtttttttataattcagggagcaatatgaaaagatcgtgccaaaattgcaagtcttttaaaaataaagcaattaatctaaataattaggttgcaactacttagttactgtattttgcactgctatgggtcaccacaatggtgcgtttttaccattttggtgcaatctctccatgagtaacccatcagtaactaattagtcaataattaatgattatagtttaacagttaaataacaaaatgcgggtgagttcaggttttttatacgcaaaaaataatgatcgacatttattgatgatagaaataacgaagggttaaacagtcggtataagcgagtgagtatgagagagtataagagaagaaagagaagttagcgtaactggctgtctttactgccccggcggttatagccagcgtgatcagcctgttgtttatcgaggattttttgacaattgatacaatatcgaacgccggttagcgcttttctacgcgcctcaggaattttttcaccacattccaggcagtaacaagcactctcgcccttacccagcgcctgacgtgcccgctgaaccgcatcgtcaacggtggaatcaatctggtcttgcactgcgccgtctccggcccatccgcttgccatcgtcagtgtcctccgaaaagcataagggccagctaagccgaccctccatagtatttcatctaacaattattaattaaattattcgatattggcttcgataaaccacaggaactgatccagatcgcgagaggcggcggtaaacatatccgcagtgtcttcgtcttcgacctgagtaatcgccttacgaatatcattcgctaccaccgcatagcggtcggccagcgctttcagatgctcttgcacgctatgaatattagtcggatagcttttcaacggtgatttatcgttgacgacttggacggttcccagcgctacgccaccgagttgcaccgcgcgctctgcaaaggtatccaggtgcccggtaatggcggtacggaagccatccagcatttcatgaacggcaataaaattggcgccgcgcatgttccagtgagcctgtttggtgatcaatgacagatcgataaattgaatcagcatgtggttcagcgctttgattgcgccaatttttacgctttcatccaaatcattacgggtgtaaagcaggtcagaagatttcgtttttaccagtttagcggtactcataataggtatcctcatgctgtattggttattaatttctttaccggatcaagtatagcagggttatataatttcgttgctccaatacggcctatcaattaaattggttataacgtcagataattagtcatagaccatgattgaataagtttttggtaacgttatgatttaaaataaattagctgaagcatttattcatctgtgctcacgggcctatttgtttttggataaattcagttatttaacctgcgcgaaacaataagatgtccatatttacatgactgcggcctttaattcctgctcactaagataaagataattatttatgaaataaagctattgtaataataggctcaaacaaggggtaattgagaggttttctgggttataaatcagagcaatatacgggctgatattcatcgggagtaagcaaatgaatacctcgctgatagcggcagggttattctatctgcaaggaagaaaaacacttcaggccgtttgagcgatgataaacaggcgagggaaagccagcagcaggttgccattgctgtgtaccggataggccgccgtgatttttagcagataagcttgcaagaaatcttgccgatcggtttcattcaaagggtcaataaaaggacgtaagccggtggatcgtacccagtcaacgatcgcctgagccgaaggcatcgggtggaaatagcgagttcgccagatatccacgcgttgagcaagaggagccagcagatcgtaatattcgctggcagacaaaattttaacgcgttcagcgttacttgccgctaattgttgttgccagcggccttcagcggcgacttctcgcatggcacagtggctgtgttcgtcacggttatcgggcatttggattgccagaataccctgcggggccaaatggctcatcaattgaggaatcaaaaggcgatgattttctaaccattgcagggaggcgttggcgtaaatcacattttgcggctgaggaggttgccaatgctgaatgtccgcaggttgaaatttacagtctggcagccgcttttgcgcgctttccagcattgcttgagaattatcgattcccaccagatgggcgtgaggaaaacgctggcgcagtaattcggtggaattacccggcccacagcctaaatcgctgacaaaatcgggcgtattgattgccacgcgagccagtaaatctgtcgccggtcgggtgcgctccgcttcaaactggcggtacaaatcaggattccagtctttcatcctaaaacctcattgttgctggctgaagagctaagcgccgacattaaatattttgtaatggcccgctgtacagtaccgctccggtaggttgcccggttggagaaccgccgtgaggttccagactgattgccatcacgttgcctttggttaacgcaactttattgaaagcgacctgtgtcggcccgctagcatttaacaagccgagagagtgaggtttttcgcctgccgcaatactccacagttcaaggctatgctgctcgccgatcggtactgtgcttaatggagttaacgtcaggctgcgggtagatttatccatgctgacaatccattggccgctttgctcgctgctggccagaaccgccaccggaatgggggcctcaggctgcaccagcaggcgggggaccagcaagagtgcagctaaacagactgcgatcgcccagccgagatatgcgccacttgcgcggcgtattgaggaagtctctgctttttcggggggaggcaattggagctggagttttttccaaatccaggccggcggtgtcacgggctgtaagctattgtccatttggctaaacaggttttgccagcgagacacttcttctgccagttcgggattccgtaggatttgtcgctcaaattgaattcgagccagcccgcgcagagtgcccagcgcatattctgcggccagtgctgattgatattcgcgtctgtttttcatattcctacgcagctctttaagtgctccagcgcgcggcggatccagcttttcaccgtgccaagaggctgttgtaagtgttctgagacctcgctgtgagaaagtccctgataataagccagcataatactttgccgctgttcagcggggagatatgccatgcaatgctccaaccgcttggcttcggaactttgctgtagctgagagaccggcgagggcgcgtcatcagctaggttatcggcctcgtcttcatcccatccctgcaaacggttatcattaccgcgcatcaaatctattgcccgattacggacaatatgtgtgagccaggtaaggggagaactgaggctgggattgtaattaatcgcctgactgagcacggtaataaagcaatcgtgcaatacctcttcggctcgggcatggttacgtaacatacgtaaggcaacggcgaaaagacgtggggaagttaaccggtataatcgttcaaatgccgcttggtcgcctttgccaatcgcttccagcagttcaatttgttcagccaaagacgcttcattcatttgtaatccctaaaagcaaggtgcagtgagacactgcacccagtatagaccgcttttatttaggcattagaactgtgtcaatgacatctatcacaccatttttctgattcacatcataagtgctgatattggccagattgcctttggcatctttaatctggatattatgaggcccattattcataaaccacagaggctgaccgttgacggttttcagctcggcggtaccgccaccctctttaatttttttctcaagctgtttcatatcatatttgccggctaccacgtgataagtcagaatttgggtcagcacggctttattttccggtttgaccagattctcaacggttccggctggtaatttagcaaacgcagcatcggttggcgcaaacacggtaaagggtcctgtaccttgtagggtatccaccagaccggcagctttaacggcggccaccaaagttgtgtgatctttagaattcacggcattctcaataatgtttttactcgggagcattgcggctccccccaccatcacggtgtcggacatcgctgctgccatagatacactgctgaatactaaagaggcacagatcgcggtacggataagcgttttcataatgttaatccttattagtatggaagaggtgagtcttgcctcacatctacctatacgaatcagcctgccgttttggatgccaaaagaagtgaatataattaataaaaaacgctagtccttataaaacaaggcatagcgtgatgaataagtcttgcctaaacggtgttaaatctgagcggttggcaccggatgcagaaaacggtgcatgatgtaagcatctacgtaaccctgtttcgggtgtttaaacgcctgcggcagggttgcaataatgccgaagcccagtttttgccaaaggctgaccgccagagtattggtgctgacgacaaaattgaactgaattgcccggtaacctaggcgctgagcttgttcaatgcagtgcagccccagctgtttgccaatgcctaaacctctgacgctggcatcgaccataaaagaggcgttggcaacgtgacaacctaatcctcgttggttatcaatcagcttatacatcccgacgattttatcttcatgcagcgcgacccagcagcgcacgccgtcaccaaaccaatattcgtaagcgacccgttctggcgtgtctgcggtgaaaacgtaggtgtcttcactggcgataaccgcctgaaaaagtggccagattgcggtgaaatcttcaggtgttgccggtcttatttccatgccatcgctctcatattgattaagtcagttcttcaatcttgggtttggctttaatcgttaaagttgcaccaatagaggcggcaataatacagcccagcgctgaccattgtatcaatgtcagatattcattcaggaaaattaggccagaaacggctgccaaagctggttccagactcattaatgtgccgaaggtacgggccggaagtcgggttaacgccaccatttccagtgagtaaggcaaggcggtagagagaatggcgacggccagagcaataggcaaaatagcgggagaaaacagcgccataccgttataggctacgccaatcgggcagaaaaccagcgcggcgatcagggaaccaatagctacggtacccggcccgtggttgcccccagctttttggccggaaataatataaatcgcccagcaggcaccggcgcccaaggcgcaggcggcaccgaacagatcgatactgtctacgcttttgcccagcggcagtaagaaggctaaacctattacggccaacccaacccacagaaaatcgatggggcggcgggaagaaaacatggcaacggccagcgggccggtgaattcaagagccacggcaatacccaacggaacagttttcaaagacaggtagaacagaaaattcattccgccgagcgccaggccgtaaaccagcaacggcatgcggctaccggctgtaaagcgcatccgccagggcttaaaaatcacaaatagaataagcgtaccaatccccagccgtagggaggtaatgccctgcgcgccgactagcgggaatagactttttgccaatgaagcgccgctctggatcgagatcatggctataaccagcaggaaaacgggcagcagggggagcgataatttggactgagaggacagcgacatccgttagagcctcggaaaaagagtgaataatcagatttttgccagtgtaaatgaaatgctgccgatgtatctaataattcgcaaaagtagcggatcagagacgggaaaaaagagaaataatttaatcttgagtgttttttatgcgttttgcggctatcttttagacggcaaactaagaattgtctggaatagcgttaagtgaggaacttcacaatttcgacaaaaattcgggaaaaggcgtatacttttagcgagttacactgttcttgaaatgatttgttacaccatataaaagtttagacaacgattcaggtgcagagtttctacctaagttttgttatattttaatggtgtttttgtttaattgaaaataatttgcgtcttgaggtggttatgaaaaaaattgcatgtctttcagcagtagcagcttgtgtattggcagtgagcgcaggtagtgcatttgcaggccagagtaccgttactggcggttacgctcagagcgattaccaaggtgttgctaacaaggcttcaggtttcaacctgaaataccgctacgagtggtccgattcccaactgggcgctatcggttctttcactcacactgaaaaaagttctttcggtgacagcagcagcgtttacaacaaagcacagtacaacgcaatcactgcgggtcctgcttaccgtatcaacgattgggctagcgtttatggcgtagttggtgtgggctatggtcgtttcactgcaaacggcgcgggtaacccagaagctaaatcgggttcaagcgattacggcgtagcatacggtgctggtgttcaattgaacccaatgcagaacgtagcgctggacttctcttacgagcagagccgcatccgtagcgttgacgttggtacctggatcgctggcgttggttacactttctaagagtaatcagccggtttagtattggttcttacgaactaaatgcgaaatccaataaaaatccgcctttgggcggattttttatgctccgagtattatcagatacaaaattatgcagatagcagcctttatggaagcgcattttccaatttatagctagataattatttttttggtaaatattaaaatttatttatactgtttaattcttgtaaagaaagaattaaccatttttattcaacggatatattccctcgccctaagtaaaagtatttaattatattaattacaaaaagttgactgatattaattgttggaacgcagacgttctggtctgacaaggttattcattattgatgtgaataaataattacattatcattttccatgtcatttaattaatcacatggaatcgttaatgaaaggaatcggagcgttattactcagcttattattaaccggatgtggcgggacttggttcccggaaggccattatagtgaatctcgtgaaccgaaatttcgacttcacggtgatgagcgcacaggtgcagaacgtatggcggattgtcatcgcactaagagctgtcgcggtgatgagtggcgccaacctaacccggattatgtcggccttagcgtgacttactgataaacctgcgtcatctagtctcattgaatatcattaatgatggataatattttagtcaccgttattgatattcaacgttaaccatcccgcgttcttgccgtgcttaaataagactgactacgctgtgttatatggaaattttcaaattaatttacgatgtggaatgcgtaaatcgaccgcaccaattcaacagattttgcgatattcaatatagcgaagctgttcgcgcttctgccagtgggtttatattctagccgtttaccctggcatttctctcaattaaaaccaccttcgccgagtgacattatccggagccagtgacgctgactccgggagattgaataacttaataattgctggcagcttcttctattagtgcgatgatttcattgggatgagaggctagagacgcatggctggagtccagccgaatggtttttttcggtttcatgcgttcggtaaaccattgttgggtttccggcggaatcatatggtcctgattggatatttgataccagcttggcttagtcttccacgcgggttccgttgaagtgtcggagaagcattttcctgaggtcggcttttgtgcagcagccatgacaacggcttcggttttgtccaaatcctgacagaaactttcatggaacttatcgtattttatccataaaaagtcgtcctgatccggaaacagattagcggctccggaaggtaaatcgcgcagttggaaaatactgccgagactttcgcctttatccggtgcaaaagcggcgacgtaaaccagtcctactagattaggtaaatgtccaagctgagaaataaccatgccaccgtaggagtgaccgaccagaatggtcgggccctggagcgaggtggccaatttttcggtgcgttccacatcgtcggccagagaggtcagcgggttttgtaccgcgtacaccggatagcctttattatgtaaagtcggaataatatgacgccagtgcgaaccatcgccccaggcaccgtgtaccaacaagatattcggttttgtcgtcatgttgtgtcccattatcagagtgcactataaagtatgataatccgcggccccttgccgcaataccacacatccatcaaaagtatagtttagatatgtgactaattgatgaggcagggcaaactcgcgcatcggttttagcaatctcataactcaataaattcgacttacgagcatttaaaatcaaacgactagcattgaaaacccagtcgaaagataaataataataattataaaacaataatttaacctgtgggttaattcttaatttaattatcttattgatttgtaattattcaatgttgtgacaaactataagatataaattattaaaaactttattaattgtgctggtttcctgactattcattaatataaaacaataggttgagccaccatgactgcgctagcacaccccgttatccctcagacccaggatacccgactcgagcagcagatacttcgacgctctattttctgcactttgattattgcggggatgggaattggttttggtattttatgtgggtcgatctcgattatttttgacggcatgttttcggcgttagatgccggtatgtgcagtttatctctactggtgtcacgtttattaggacagccgaatagccgccgttttcaatacggcttctggcatgttgaacccttggtactggcatttaacggcagcctattggcctttctatgtctttacgcctttgtaaatgctatcaaaggcattacagaggggggcagggagctggaattaggctgggccattgcgtatgcgttagcggtcagtattttctgttttaccattttcctgaagcagcgccggttaaataaacaggtgaaatcagagctgattgcgttggataccaaaagctggctgatgtctgcctgcatcagttctgcgctactggtggcttttctgctgtcctggagtttggaaggcaccgcctatgagtatctgattgtttataccgatccggcggtgttggcattgttaactttgattttgattccggtgccaattaaaactgtcatatccgccgtgcgcgaagtactacaaatgacgccggatacgcttgatgcttctatcgaacgtattatggaacgcttaattctggaatacggtttcctggattattcccattatgcaacacgggtcggccgaggtttatttattgaaattcatgtggttattccggaatctatggaaaatgatggcgtacggcgttttgataaaatccgcgatgagatagctttggcgattggagaccccggaccgcatcgctggctgacaatttcatttacccgcgattctaaatggctgtaattattgtttagccttcaggcgttctccccaaaatatcaacgaatgaagaggctttattctgtcgcactatctacgggggaatggttctgccagattctattattatcccgccattggatatacatcggtgaattacgctcgattcccgcaatcaatttatattaaagattatctgatggcgctgtattgctgtttttttctaaatatttcttaaacaactggcgaaagctgagaacttttcaaaaaaggcgtgctttaatccctgcgcaataaaaatgcagtatctcgtttggcgaggctcctatacaaacacaggttactgatctgacgacatcgagagatgcccaaggttaagacaggctttatcggattaaggtttagcccaaagtaacttctgatgactctatcagatacgttgtatagtgctaaaacctggacgcggagataggcagtctgcactccctctttggttaccgcccctatgcgatcactgttgaagtcttaacagatatagggacaatcatgattaactcactatcacacaataatgctcagctcaacaccaacgccgatgtctgcgaagatgcatccgtcgcggcttatatgagcgataattttattactatttctgaaaaactgaccgctaaggaagcctgtgactatttgctttctcagcttcagacggatgaaattccttctcaattatttgtcaccagcgatgattatcacctgtgcggcgtgctgtcggtaaagaagttactgcaatccatcgagccgaacagcccggtcggcaccatgatgaaccaaacctttttccatgtttcccctgacgatgagcgtaatgatgtcgcgcatctattaaataaaggcggcgtagatgtggtgccggttttggttaatcggaatttggttggagtattgggcgaaaaagaaattgctcgtctgatcgaagatgaaaataccgaagatgcccagcgccagggtgccagtttgcctttggataagccttatttaagtaccagcccgtgggaattatggaaaaagcgctgtccgtggttgctgatgttatttgtggccgaagcttatactggtacggtaattaaagcgtttgaagaacagctggaagcagttattgcattagcattctttattccattgctgattggtaccggtggtaacagtggaacgcaaattacgtctactctgattcgcgctatggcattaggggaagtcagtctgcgtaatatcggtaatgtgatcaaaaaagaggtcacgacctcattaatgattgctgtcaccatcggtggtgctgcctggattcgcgcgtggattatgggcgtgggaatggacgttacgttagtcgttagtctggcattggtcgctattactatttggagcgcctttgtttcatccattattccgatgctgctcaaaaaagccggaatagatcctgcggtagtttcagcgccctttatcgccacttttattgatggtacggggctgattatctacttcaagatcgcgcaagttgttttgaatatataaccaaagagtgggtatgacgacggaacgctgcgcttgtatatgagtacagaaatggtcaattttctgagtaccagtgcagcgtttttaataaagatgtagccgcggataaatcaattattcgcggctaacgtaaaaagggattgaggaggtggtcatcgcaacatattgtttggtaaaaatattaaggggattattatagattagatcaaacaaaggtttgttatgaataacatgacggtatttatgtggtttcttggaattatcagcgtattgggttttgtggccatttatatgagtgcgaaatgggatgaataacagcaaagggtatgattttgcctagaagcatccttcctgcaaaaaatgtaggatgtgcaggaaggatgagcatgcttaatgattatcattgtcaatgaagtaagtgaataagtattttataaaataaagcaggtaaagctcggatttattttataaaatatacaaggaaggtggttatggtcttttatattatcggcattctttatgccacctttatgatttctgtcggtatttacgagattaatctggatacgggagaaagccaggaaactttttatcggatattactggtgttctcaggtagcataatagtcgttgcctttatatggagcctgttacatcggctgaaaggctcgaaaaaataaagagaagaggctgcgcaaaagttaatcattcgcatttctcttattaactgaattactaaagttaaagcatccggcctagggcgggagatttttttatgcccaaaatcggtcgatgtaaatccagccgtcgctaagtgagtacgacatgcaaaatgaaaaacaagacgttgccttgaagtctatggtggccagcgggttactttcggttggtaaatttgtcgtgggcatatttaccggtagtattggtttgatttctgagggaattcattctctgacggactttattgctacaactattacctggtgtgcggtgcgcgtgagcgataaacctgccgatgaagatcaccattttggtcacggaaaggtcgagaatatggcggctctgtttgagattctactgttggtaatggcggcgggctggatcgccgtcgaggcatggaaacatttctggggggaaactcagcccattatcgctgcgccagcggttattgcgacgttgcttattgcaatggtgattgatttctaccgggttcgcgcgttaagacgagttgcagcggaaacaaatagcgctgcgctagaagccggagcgttgcattttctctccgatatgatgtcatccggagtggtgttgctgggcatggtatttgttttattaggctatccaaaagccgatgcggtagcggctatggtagtcgcgctgtttattctggtgacggcaatcaaattaggaaaacgctcgtttaataccttaattgataccgcgcccgaaggaatacagcacgaaattaccggttcattgacgcgtttcccggaagtgcttggcgtagctaaatgccgggtgcgcgatgccggagctatgctatttatcgaagtgactatcgtagtatgcagaacgttatctttggaacgtatcgatcggttaaaaaggcatatttccgaacaattggtggcggattatagcgaggctgaaataaccctattggctacgccgaagaaaagaagcgatgaaaatatggcgactcatttacgggttatcgccgccaataatgacgtagccattcataatttaactttgcagcagttaactagccatacctgtattagcctggatttagaagtgccagcgcatttcagcgtgactcaggccgacgtggtggctaaagcgatgaaatcggctatccgtaacgatttgggcagagaaactgaagtcgatattcatattgaaccgcagataaactacttgctcagcacggaagatgtagcggaagaagaactgacgatgattagcgaggctttacagcgtttaacgcagcaggacagcattttgcgagggattcaggatgtcaaagcgcgaaataccgacgttggtatcgtagtcagtttcaattgtatcgtgctgccttttatttctgtgatcaaggctcacaccgccatcgataatatcgaaatgaagctgcgcgcactttatcccaccatttcccgcgttgtgggttacgttgagccgacaccggttaatcctgctccggcaataatggccaccccgatccccgtcgctcccgtgcctacgacataaagttcagcaattattgctgtgcatggctgtgtgccgatggcgcgttttacgcgattaaccgtcagacagccgatattattcatgacggtttctggacaggaaagcggtgactaaaagcgtcattctcggcgggcgatgggaaattgtgcaaacgaagggcgatactgcggccatattgtggcataatgcgcgccgaatcacatatttctaatattgatctccccctattcagtaatccaatcgagagcaagctctgtgctaagtactaacaatatcaccatgcaattcggcagtaagccgctgtttgaaaacatctctgtaaaatttggcggcggcaaccgctatggtttgatcggcgctaacggctgcggcaagtcaacctttatgaaaatcctcggtggcgatttagtaccgagcgcaggcaacgtattcctcgatccaaacgagcgtttgggtaaattgcgtcaggatcagttcgcctttgaaaacaataccgtactcgacaccgtgatcatgggtcatggcgagctgtgggaagtgaaagaagaacgcgaccgcatttacggtctggccgaaatgagcgaagaggacggctataaagtcgccgatctggaagttgcctacggtgaaatggacggttacagcgcagaagcccgagcaggtgaattattacttggcgtaggtattccggtagaacagcattatggcctgatgagcgaaatcgcaccgggctttaaactgcgtgtgctattggcgcaggcgctgttctccaacccggaaattctgctgctcgatgagccaaccaacaacctggatatcgatactatccgttggttagagcaggtgctgaacgaacgtagcagtaccatgatcattatttcccatgaccgtcacttcctgaacatggtgtgtacccacatggcggatttggactacggcgaactgcgggtttatccaggtaactacgacgaatatatgactgcggccactcaggctcgtgaacgtctgttgtctgataatgctaagaaaaaagcgcagatttccgagttgcagtctttcgttagccgctttagtgccaacgcctccaaatctaaacaggcgacttcccgtgcccgtcagattgataaaattcagttggatgaagttaaggcctcaagccgtcagaacccgttcattcgcttcgatcaggaaaagaaactgttccgtaacgcgctggaagtggaatctattactaaaggtttcgacaacggcccgttgtttaaaaatctgaagctgatggtggaagttggcgagaaggtcgcgattctgggccagaatggtattggtaaaaccactttgctgaaatgtctggttggcgagactgaactggattccggcagcgttaagtggtctgaaaatagcaaaatcggttattacgcgcaggatcatgccagcgatttcgacattgacctaacggtcttcgactggatgagtcagtggaaacaggaaaaagacgacgagcaggcggttcgcagtgttctgggtcgtttactgtttagccaggacgatatcaagaagaaagttaaggtgctgtctggtggtgagaagggcagaatgctctttggtaagctgatgatggagcgtccaaatattctgattatggatgaaccaactaaccacctggatatggaatccattgaagcgttgaatatggcgctggaaatgtatgaaggtactttgatcttcgtttcccatgaccgcgaattcgttagctcactggcgactcgtgtgattgaaatgactccaggcaaaatccacgactttaccggtaactacgaagactatctgcgtagccaaggtattcagtcttaattaatatcgattagcgctgaaattaaaaaaggctggtgcaaatgcatcagcctttttgttttctggcgtagcctaacgcttagtttttaccgcagacttcgcagtgaggtgctttcgccagcttcatggtgcggaattccagcgtcatggcgtccagcattagaagcctaccacggcgtacctcgccgtaaccgctaagcagcttaatggtttccattgcctgtaaacttcctatagtgccgaccaatggggccatgacgccggtttccacacaggtgaggggggtatcaccgaacaaacgactcaggcagcgatagcacggctcatcgtcctgataggtaaatacgctgatttgcccctccattcgaatcgccgcgccggaaaccagtggctttttctgaacaaagcacaggcggtttagttgttcgcgaattgccaggttatccgtgcaatccaggactaaatgatgatcggcgatagcggctgagagctgcgaatcatccagttggcgatccaacgtagccacgctcaaatgcggattgatttcttctaaagtcaggcgcgcagacgcgactttgctcatgccgatccggtcatcccgatgcagaatctggcgctgtaaatttgataaagacacggtatcaaaatccagcagcgttaaatgcccaacgcccgccgccgccagatattgcgcggcggcgcagcctaaaccgcctagcccgacgaccaagacgcgtgaggctttaagcttttcctgaccgtcgaaatcgaaaccgcgcaggacaatttgccggttgtagcgcagcatttcagcatctgaaagttccggcagcatatcagcctcccagcaagccgttaaatagctctatgtctacgctttctccaacggcgaccgaacctcgatcccgttctaaaacgataaagcagttgccttggctgaaggcgctgaaaacatgcgagccttgatgcccggtggagctgacctccagcttaccgtcggcaccgcgggagaaaatcccacgctggaaatccagtcgtcccggcgattttttcaatggcgtaatcgccgttgcagtcaggcgtagcggcggttgccatgaagtctgtccggccagtttagccagcagcggttgcaccagttgatagaaagtcacaacggcagaaaccgggttacctggcaggccgcagaaccaggcgttcttcagtttgccgaaagcgaaaggtttacccggtttgattgccagtttccagaagccgatgtcgcccagttcttctagcatttgtttggtgtaatccgcttcacctacggaaacaccgccgctgctgattaccaaatcagccgcttcatcagcctggcggaaggcgtggcgcaaagcttcctgatcgtctgggatcacacctaaatcgataacctgacaacccagttgttgtagcattaaatgtacggcaaaacggttggtatcgtaaatctggccttctgccagcggttggcctacggcctgtagctcgtcaccggtagaaaatatggcgactttcaactggcgcatgacctgcaatttggcaatgccgagggaagctaacaggggcagttcggctacgcccagtttgactcctgcggggaacacgctggcaccttgctggatatcttcccccgccaggcgaatattttgcccagcttttaccggggcggtgaataacacgccttgttcacttacgctggcctgctcttgcataatgaccgcgtcggcaccgctcggaaccggcgcaccggtcataatacgaatgcagctgttggcgggccattcaccgtggaatggcgacccggcaaaggctttcccagcgacggacaacgcagtttgggcattcacctcatgactgcgtacggcgtaaccgtccattgccgaattggcgaaaggaggaacgttaatgggggaagtcactgggctggcggtaatccggcctgcggcatctgtcagcggaatattttccgtctctgtgagcggagtaacctgcgacagcatttttttcagcgcctgttccagagaaattaaatccgaggtgttacagtgatccatgctggactccgtggtcaggacattccggcgggtaagtcagtcaccggcggtaaaatatccaatcaaaaagggtgagggcggctattatggcagagatcgacaagagggtgaatgaattgaccggcaaagggaccggcgacgtcacactcggagcagcgcatcaggggataaacgggagcacatatgaatagccaacagattctggatttctggtttaatgaaatagacccggcattctggtttacaaaaagcgatgatttcgatgctttgctacacaaacgttttggcgcggtctggcaggcggcgtccaagggcgaactggcggaatggcgacaaactatcgacgggcgactggcagaaattatcgttttggatcaatttagccgaaatttattccgcgatacgcccgcttctttctcctgcgatggtatggccctggtgctggcgcaagaagccattcatactggcttaaccgggcaattaacgccggaacagcgcgggttcctctatttgccgtttatgcattcggaatcacagaagatacatcagcaggctttagtgttgtataccgagcttaataatggcgaccagttggagtatgagctgcggcataaagcaattatcgaccgctttgggcgttatccacaccgtaaccatattctcgggcgagtttccagcgcggaagaacaggcgtttcttctgcagccagggtctggcttctaaaaatgccacatcagaacctggctattacgaatataagatggctaggttcttatttattttagtgatgcttaaaaagcaatttccgcagccatcctttattctcctgttctatcaggaattttttaatagaaaacacattggcgtcggagtgccaaatttggccgcgatcgctacttcagtattacagcgtttcttaaaacataccgcttcgtattcaccatgttcattgatggcatgatcaagtgcgaagaaaataaatggtgataaaaataacgttcgtcatgttagttaggtgtttatgaaggaatatttattgcgattgaaaataatgaggcgtaattcaataaaaccaataaacccgaggggctataagcaggattggccaataaaatggcaaaaataaattaatatttatcgcctaggggaagggcattgaaacgaaatataatgacagaggaggaatgattagttggggaataaaaattattccccaatggagcgacttagttatgcagatactcagcgtggaagcgcagatgatcttcaataaatgtcgctatggtgaaatagctgtgatcataaccaggctgaatgcgtagcgtgagcggccagtctttttggcgcgcgagttccgccagtttggctggttgtagctgatcggccaggaattgatcgccatcgccctgatcgaccagaatcggcagcggctggtcactgttaaacagtaaatgacaactatcatattgcagccattttgtttcatgttcaccaagatattctgtgaatgctttacgcccccacggaacctgacaaggattaacaataggagcaaaggcagatactgactgatattgctgtggattacgcaatgccagcattaaggcgccgtggccgcccattgaatgtccgctgatagattgccgttcgctaacgctaaagtgttggcgaattaacgccggtaactcttcgctgacataatcgtacatacgaaaattcgctgaccagggtttctgagtggcattcaggtagaaacctgctccctgacccaaatcgtagttttcgtcattcggtacgtcttcgccgcgaggactggtatccggcatcaccagtaccaatcccagctcggctgcaatacgctgcgcgccggctttcagagtaaagttttcgtcgttgcaagtcaggccagacagccagtacagcaccggcggcggattatcatcacgcggtggtggcagatagatgctgaatgtcatgttgcaattcaggctgcgggatatatggcgataacgctgctgccagccgccaaacatccgatgctcttcgagaagttcaattgacgtatgcatgtctgctctgcctcctggctttatttattaaagtgaatcacgctgcgaatagatttaccttcatgcattaaatcaaaggcttcgttgatttgctccagacccatagtatgagtaataaagtcgttcagctggaatttaccgtctaaatattgctgcacaatgcccggcaactgggagcgtccttttacgccgccaaacgcagagccacgccatacgcggccggtaaccagctggaatggacgggtggaaatttcttcaccggcaccggctacgccgataatcaccgattcgccccagcctttgtggcagcattccagcgccgagcgcataacattaacgttgccaatacattcgaaggagaaatctacgccgccgtcggtcagctccacgatcacgtcttgaatcggtttgtcataatcttttggattaatcaaatccgtggcgcccagtttgcgggccagatcgaatttactggtgttgagatcgataccaataatacgacctgcgccagccatctgtgcgccgataatggcggacagaccgatgccgcccaggccaaatattgccaccgtatcgcccggttgtactttagcggtgttcattaccgcacccatgccggtggtgactccacagcctagcaggcagacttcttccagcggcgcttctttattaatcttcgccagcgaaatttccggtacgacggttaattcggagaaagtcgatgtgcccatgtaatggaaaataggctgaccatttttagagaagcgggtagtaccgtctggcatcaaacccttgccctgagtagcgcgaatcgcctgacacaggttggttttgccggagcgacagaatttgcattccccacattctggggtgtacagcggaatgacgtgatcgcccacggcgacgctggtgacgccttcgcccacggcctcaacaataccgccgccttcgtggcctaaaatcgccgggaagacgccttcgggatctttgccagacagggtgtaagcgtcggtatggcaaacgccagtggcgacgatacgcaccagcacttcgcctttttgcggtggcatcaggtccacttcttcaatggatagcggctggttcggcccccatgcgacggcggcgcgggttttgatcatctccatggtgttgctcctcggtttttcacgatagtgttatgtaaattgactttttatgtatactatttgttgcgttaacgttttaagttacgggttttgcagtggtttcaatttgctcaataatcagctctttcagtgcgcgaacgttcgggctgaaggcatcttttcgccagataagccaggtggcggtatcggcaaattcagggggtaacgggtgtacccgaacccgttcgtggccgggtagtaatgccagtactgaatggggtatgagcgccagaccggcaccgctggcaacgcaggccagcatggcgtgatatgactggatttccagaatagtgccaggcagcacgccagcctgtcgaaaccatgactccagccttaaacggtaggagcaactggggcggaaggcaaatagggtttcatccacagcgtctttggcctgactgatcggcgggtgatccaggcatgagatgatcactaattgttcttcgaaagatcggcagccatgtagttcttcatggtgaactggaccatcgaccaatgccgcagccagcgtaccggcgcgtacctgttcgataatttcgccggaagtgccggtgttcagcgatagtgaaacctgagaatagcgttgatgataagcggccagtaagttgggtaaacgcgtggctgcggtgctttccatcgatcccaatggaaaattgcccgcaggctcaccggcatgggtaatacgcatggcttcttcactcaacgccagaatacggttggcgtaacagagaaaattatggcccatcggcgacaggcgcagacgctgcttttcacggataaacagatcggtacccagctcaacctcaagctggcgcaggcgggtggttagattcgacggcacgcgatgcatctgttccgccgctctggctaccgaaccggtttccgctacgcagcaaaacatgcggagttgggttaaatccattactgttctctttttgtgatgaacttcatgagtattattcattttttgtgattctaatgctgaggcatgatattagcaactttcttttaaccggcagtttgggaacaggcagaacagagtcatggcgttaagaatcgctttaagtgggtttctggcattagtggtagcaatggggattggccgatttgcttttacgccgcaggttcctctcatgatagctgaacatcagttcagcctgaccggcgcggggctggtggcggcattcaactatctgggttacctgtgtggtgcctacgatgcgatgcgagccaatcgttacgttgagcgtcgcctgtggctgggcgtatggggcgcagtgacgctgacattgctctccgccgtaatagaaggcccgtggtggcacggtgtggtgcgtttcgctatcggttgggccagcggctggtcaatggtgttggtggcagcatggactaatgagcgactggcgcactatggtcgcccggcttttagcgctgcggtgtttgccgggccgggagcgggtatttttattagcggtatactggccgttgtgattcatagctacgggttaacggcatcgcaggcttggctggtttacggtgtgttggcgctggtgctgattggcgcgatcagtatcaacttacccagagcaggggagttacatcgcccgcaggtagcggcggaaccgttgattttgacgcctgcgctgaagcgtttggtctggagctacagtctggccggtttcggttatattttgccggcgacgtttctctcacaaatggcggccgcgcgttttccagacagcctgttcgctcagtttgtctggccggtttttggtggtgcagccgtggttggtattggcttaggcattttgacgcgtcgttgtctgacgactcaaactcgtctggcattgacgctgtgggtgcaggcattaggggttctgtgcgctgaattagtgccgggcgtgagcggtttggctctcggcgcgatgttgaccggcggcggttttctctgtgtggtgcagctatctttgcagcacgggcgagagctggcaccgaatcacacgcgctacatggccggtttgctcaccacgggctatgccgttgggcaattagtcgggccaatgctgtctgcgacctccacggcgttaactcaccggctagagcctgcgctgtatgtggcggtcgtcgccctgattgtggccggggctttggtgttcaatacggcggcgcgcgccggagaaaaaacgacgggataattcggggagataaagcatctgaaaccgctgtggataagggcatattgcccttatttcatcatgatatgaaacacaatcactggataatctgcacgctctcatctagagtggggcacaaaatccggacgtgatctgcatcaatgtttattcccgccgggtgcgtaagcctgttggagagaagaatgtcatcgctaagtaaagaagcaatattggtccatgctgcattggaagcccgtggtctcgaaaccccgttacgaggacaagtgttagattctgaaacgcgcaaacagcgcattcaggagcatatgacagaaattatgcagctactgaatctcgatctgtccgatgacagtctggccgataccccaagacgcattgccaaaatgtatgtggatgagattttctctggtctggattacgccaatttccctaaaatcaccgtcattgaaaacaaaatgaaagtggatgagatggtcacggttcgggatatcactctgaccagcacttgtgaacatcattttgtcactatcgatggtaaagccaccgttgcctatattccgaaagacagcgtgatcggtttgtcgaaaatcaatcgtattgtgcaattctttgcccaacgtccgcaggtacaagaacgtttgactcagcaaattttgctggcgttgcaaactctgttaggcaccaataatgtggctgtgtccattgatgcggtgcattattgtgttaaagcacgcggtattcgtgatgcaaccagcgcgaccaccaccacctctttgggcgggctatttaaatccagccagaacacccggcaggaattcctgcgcgcggtgcgccatagcagctaattcctttattgaacgagacggcacgctaaagtgccgctaaacaggatgtcgagtatgcgtcaacggatcgcaactttggacagcgcgagagggttggccatttttggcattcttctcctcaatatcagcgcgtttggtctgcctaaggccgcctatctcaatcccgcttatctgggaatgccttcgctgtctgatgcctggacgtgggcaattctggatatttttgctcaagccaaattcttatcgatgttcgctattctattcggcgcaggtattgaattgctgttgcatcgggggaaagggtggatacaggcgcggctgtctattttgctactgctaggattaattcacggaatttttttctgggacggcgatattctgctggcctatagtctgatcggtttagtttgctggcgaatgattcgtgatgctaaaagtgctgaaagcttattaagaaccggcggagtgttgtatctgattggcgtcggcgttttgctattactcggttttatcgtcaccggcgagccagggcagttttggatgccgggaccggcggaattacagtacgaacagttctggaagctacaggggggccgtgaggcgtggataaatcgcgttgatttattgtcttccaatttgatagcaatcggcgcgcaatacggctgggaactggccggctttatgctctttggcgcaggattaatgcgcagcggctggctgcgtgggcagtttagtttgctgcactatcgcctacaggccgcgtggatgataccgctttcactggtcattcaaatcccggctatcgctctgcaatggcatctacaatgggaatatcgctggaccggatttttgctgcaagtgccgcgggaactgggcgcgccgctgcaaacgctgggttatctggcgttgtgttacggtttttggcccagtttgtcccgcctgcgtatcagtcactggttagccaacgttgggcgtatggcgctgagcaactatctgctacaaacgctgatttgtatcaccattttctaccgtttcggtctgtatcagcaattagatcgcttgcaattattagcggtggttccggctgtttggttatgtaacctattgttctctaacctatggttatcctgtttcaaacaagggccgctcgagtgggcgtggagaaggttgaccgcacaggcctgtggacaggtggcagagagcactgatagcaagaagtaatctacttgatgaataaactgaagctggttagttaaaaatttgtatgtaagcgttttctttcctgtgacgtatttcacgtagtcgcaaccctaaactggttaggataagtgccaatatcggcagtatgcagaatgaatgcgctgccttcctcaccacagggcgatgtttctatggccacagtcaattccattactattcgtgatgttgccaaactggctggcgtttctctcgctacggtatcccgagtgctgaataaaagtgcggcgatccgtccggccacgcaggccgcagtgattaaagcggtggccgagctggggtatcgccccaatgccaatgctcaggcactcgcgaaccaaagtagtgacaccattggcgtggtggtcatggatgtctccgatcccttttttggcgccttggtcaaaacggtcgataccgtagcgcaacagcatgataagtatgtattaattggtaatggctatcatcaggctgacaaagagcgccatgctatcgaagtgctgatccgccagcgctgtaatgctttggtggttcacgccaaagcgttagatgatgcggaactgatcgcttttttggatcaaattcccggaatggtattaataaatcgaatcattcccggctacgaatcacgctgcgttgggctggataacgttagcggtgcgcaaatggccagccgattactgttgaaacacggccacagacgcattggttttcttggttctaaccaccccattgacgatgtgattcagcgccagcacggctatattcaggctttggaagcagcaggggtttacccgcaggagagttggcgtacctacgctacgccggatttggccggtggagaaacggcgatgatcgatttgctgagtcgcaatctcaatttgagcgcggtttttgcctacaacgattctatggctgccggggcgctggcggttctaaaagaaaacggtatcatcgtcccggagcagttttccctagtgggttttgatgatattcctattgcgcgctataccagtccaaaactcaccacggtcctctatcctattgtttcaatggcaattttagctactgaattagccctctccggtgccagtcaatcgcgagaggataatgccagctattgcttccagccgacgttggttccgcgtcactccgttacttcctgccaaactgtggcatcgctcactagttgagtatttattattgtgtaaccgttttcaatctgtgagaaaattcacagattattaacaaagccccgtctatgctttattcgttttctctctgcctggatcgcaattttaccgctgaggtaaggcaaattaccggtaatgaccccgcagatagtgtgatgttgttttgccttcactcgcggtaagcggtgctttctcgggaaactgaccgttaagcactgatatgttcgctggtggcaggctacttacacagctttttcggagttgagtgaggtcaaggacgatagatattcagttgtcagctgctctgaccgatggtttcgattatcgctaaggcaacggtgttatcaccctgtactaccctacataaacccggagatacaaatgaataagaaggttttcactttagccactctggccgctagcatgctgtttggcgcggccgctcaagcagatacccgcattggcgtcaccatttataaatacgatgacaactttatgtcggttgtgcgtaaagccattgaaaaagaagccaaaggttcgcctgacgtcacgctgttgatgaatgattctcagaatgaccaatctaaacaaaatgaccaaatcgacgtattgctggcgaaaggcgtgaaagcgctggcaatcaacctggttgatcctgcggcggctccggtcgtgattgataaagcccgcgcaaacgatatcccgatcgtgttctacaacaaagaaccttctcgtaaggctttggatagctacgataaagcttattacgtgggtactgattctaaagaatccggtgtgattcagggcgaactgatagccaaacactggaaagcctcaccggcgtgggacctgaacaaagacggccagattcagtatgtactgctgaaaggtgagccgggccatccggatgcagaagcgcgtaccacttacgtgattaaaacgctgaatgataaagaaggcattaaaactcagcagcttcaattagataccgcgatgtgggataccgcgcaggcgaaagacaagatggatgcctggttgtctggtcctaatgccaacaaaatcgaagtggttatcgcgaacaacgatgcaatggcaatgggcgcggttgaagccttaaaggcgcacaacaaaaccaatattccagtatttggcgtagatgcattaccggaagcattggcattggttaaatccgggcaaatggccggtacagtgttgaacgacgcgaataatcaggcaaaagctacctttgatttagcaaaaaatctggccgcaggcaaagacgcgactgacggtactaaatggaaagtggaaaataaagttgtgcgaattccatacgtgggcgtagataaagacaatctggctcaatttaccaaataagtatttattacctgctgctccgtttcgctcaggggggccgggcggatcagcgggttttatcaggtatccttattttaaagcggttttgatcgccaatgatgcgaagccgttttttagccaggtgtagctatggccgatattaatacagcacagccgcgcgagtggttgctggaaatgagtaatattaataaatcatttccgggcgtaaaggcattagataacgttaatttaaaagtccgaccgcattctatccatgccttaatgggagagaacggtgccggtaaatcaacgctattaaagtgtctgtttggtatctataaaaaagactctggcagcattatcttccagggcgaagaaatagaattcaaaagctcaaaggaagctcttgagcatggcgtttcaatggtacatcaggaattaaatctggtattacaacgtacggtgatggataacatgtggctggggcgttatccaaccaaaggtatttttgtcgatcaagacaaaatgtacaaagataccaaagcgatttttgatgaattagatattgatatcgacccgcgtgataaagtggctacgctatcggtatcgcaaatgcagatggtcgaaatagccaaagctttttcctacaatgccaaaatcgttattatggatgagccaacgtcgtcactaacggaaaaagaagtgaaccatttgttcaccattatccgtaaattaaaagaccgcggctgtggcattgtttatatctctcacaagatggaagagatattccagctgtgcgatgaaattactattttacgcgatggacaatggatcgccacccagccgctggccggcctggatatggataagattatctcgatgatggtcgggcgctctctgagccagcgtttccccgatcggcaaaataaacccggcgaagttattctggaagttaaaaatctgacttcactgcgtcagccttcaattcgcgatgtgtcctttgatctgcataaaggggaaattctcggcattgccggtttagtgggggcgaaacgcacggatatcgtcgaaacgctctttggcattcgcgagaaaatcagcggaaccatcaaactacaaggtaaatccatcaataataacagtgccaacgaagcgattaatcatggctttgcgttggttacggaagagcgccgttctaccggtatctatgcgtatctggatattggtttcaactctctgatttctaatattcgtaattataaaaataaatttggtctgctggataatagccggatgaaaagcgatacccaatgggtgattgatgccatgcgggtaaaaactcccggccatagaaccagtattggctcactttccggcggaaatcagcaaaaagtgattattggccgttggttattgactcaaccagaaatattaatgttggatgaaccgacgcgcggtattgacgttggggctaaatttgagatttatcagctcattaccgaactggcgaaaaaaggaaaagggataattattatttcatccgaaatgccagagctgttagggatcaccgacagaattctggttatgagcaacggtctggttgcgggaattgtcgaaacgaagcaaacctcgcaaaacgaaatattgcgtcttgcatccttgcacctctaatctagttgaaggttcttattatgaatgcgttaaataagaaaagcttgctcacttatcttaaagagggcgggatttatgtagttttgctggtgctgctggcaattatcattttccaagacccaacttttttaagtttgatgaatttaagtaatattttaactcagtcctcagtacgtattattatcgcgttgggcgttgccgggttaattgtgactcagggtacggatttatccgccggacgacaggtcggtttggctgcggtcgttgccgcgactatgttacaagcgatggataatgtgaataaggttttccctgatttacaaaccgtacctattccattcgttattttaactgtctgtctgattggcgcaattattggtttggttaacggtattattatcgcctatttaaacgtcacgccgtttattaccactttgggcaccatgattatcgtttatggaatcaactccctgtattacgattatgtgggcgcctctccaattgccggcttcgatcctgcgttttcctcatttgctcagggattcctgcgattcggtgattttaaactctcatacattacgttttacgcattgattgctattggctttgtttgggtgctgtggaataaaactcgtttcggtaaaaatatcttcgccatcggtggtaatccagaggcggcaaaagtttctggggttaacgttccgctaaacttaatcatgatttatgcattgtccggggtgttttacgccttcggcgggatgctggaagcgggacgtatcggcagtgccaccaacaacctcggttttatgtatgaattggatgccatcgcagcctgcgtggttggcggcgtatcctttagcggcggggtaggtacggtcttcggcgtggtcaccggggttattattttcacggtcattaactacggtttgacctatatcggcgtaaacccttactggcagtacattattaagggcggaatcattatcttcgccgtggcgctggattcactgaaatatgccaagaagaaataaaggctaattgaaagacggtctcgattaagagaaaagccagtcaggagtcatccggctggcttttgtttttttatacagtttatggcgactgagattcttggttctggcgccgcgagggacgcttcggtggcttacgccacttcgattccctcgccgcattctcccgttactacctcggttgttcaacacccaggtgcggcacgctcgcggatcaggttatttctctcgcttatcagctgccagcttatgttccagttcgaccaactgttccggtgataccgcaggataaccctgagcatcatcaggcacgatatgcacagccggaataggaatcagtggcccaagaaaacgcggctcgcgcttcaaaatatagaggtcagtcaatgcacccaagcgagcaaaaatctctctgactcgcaccgaaagcatatttttcggtgaaggaaccgcatagcactgcgcctgaatccccatgtgcatggctataaacagcgcgcgttcgcagtggaaacgctgcgtgacaataataaaatcgttggtgtcgaataccttgcgggtgcgaacgatagagtccagcgtgcggaaaccggcatagtccagcacgatatccgcaggagccacgccagcggcaataagatctcgtcgcatggtcatcggctcattataactttgctgcgcattatcgccgcttaacagcaggtagtttaccttgccgctgttgtaggcgttaatcgccccttgaatacggtaaaggtaaaactgattgatgacgccggtacgataatattttgccgttcccagcaccacgccgacctgacgatgaggtaattgttgaatttcatcatagatatagggggcggttttccaactaatccaacgatcgagcacaatagccgacgccatcagcaatcctgcgatgataaataagctgaaaatcaggcgtttccacattctcgggccttggttgcgtcgatgcttggggttatctgcaaggctactttacctgatacggcggcgcaagacgtgacgagggcagttaagctgatttttgtcattaaaaagcaaggatttctctaactggatagagattaacctgcccgagggcaggttgaggtaaaactagaatgaggtacgcttgtaggttcggtactgaggctgccaataattatgttcgatagcctgcgccagcgcgttatcagaggtgacggtcgccacgccctgtaactgtgcggctttacccacctgcatcgcaatactcttggaaacagcctgaatatcatcgatattcggtagtaaagccccttcaccgtgaatagccagcggagaacagtcggccaatgcgcggctggcggccatcagcatgccatcggtaatgcgacgggcaccggatgctaatacgcccaaaccgatacccgggaagatatacgagttgttgcactgagcaatagggtaaatagtctctttgtagctgaccggcgcgaacggactcccggtggcgaccaaggctgcgccgttcgtccagttcagaatatcttccggacgcgcttctacccgtgaggttgggttcgacagcggcatcacgatagggcgcgcacagtggctgtgcatctcgcggatcaattcttcagtaaacaagcccggctggccggatacgccgattaataccgttggcttggcgtgacgaaccacgtccagcagtgagatagcatcgtttttcaaatcccagttttgcagattttcgcttttctgcaccagcttgctttggaaatccagcaggtttggcaatttatctgtcagtaaaccgaagcgatcgaccataaacacgcggctgcgagcttcttcttcacttaagccttcggacatcatctgcgcgataatctgttctgcgatcccgcagcccgcggaacctgctcccaggaaggtgacggtttgatcccgcaattgactaccggcggcacggctggcggcaatcaggctgcccagcgtcacggcggcggtgccttgaatatcatcgttaaagcagcaaagctcatcgcggtaacggtttagcagtggggtcgcgtttttctgggcaaaatcttcaaactgcaataatacgtttggccagcggcgtttgacggcctgaatgaattcatcgacaaattcgtaatattcgtcgccggaaatacgcggatgacgccagcccatatacagcggatcattcaggcgttgcgggttattggtgcccacgtccagcactaccggcagggtataagccgggctgataccgccacaagcggtgtacagagacagttttccgatgggaattcccatgccgccgatgccctgatcgcccagacctaaaatacgttcaccatcggtcacaacgatgactttaacgttttgtttggtggcgttttgcagcatatcgtcaatgcgatcgcggttcggataggaaataaacagcccgcgagctcggcgataaatatcagagaaatgctcacaggcttccccgaccgttggtgtgtaaataatgggcatcatttcgctcagatgcgcttccaacaggcggtaaaacagggtttcgttggtatcttgaatattgcgcagatagatgtgtttatcatcatcatttttgaagtcttggtactggcgatacgctcgctcagcctgttcttcaatagtttcaactgcttcaggtaacagtccatgcaggttaaagtggctgcgctcgtcgtcagtaaaggcgctgcctttattcaataagggaaattccaacagaatcggccctgcgtagggaatgtacagcgggcgtttactttcgtattcaagttccatgagttttactcttaagcgttatcggatagccgttactgactccgatcctaagagatagggaaaatatgtacagcatttgttagcaatttataacaattgccaacagaaatgagagttaaagagcaaaaatcagcgtggtagtgattttaattggcgcgaataatggcgcttattaaagcgcctgattactttaactgttaattaattacacaactcatatttattaaacattagcactcattttgcttatttatatgcgttatgggagtttgtaacagtgagttctatgcgctggccgtatgacacttccagcgtattgccatcgggatcggcaaaatacgcccaataaccgacgggttcaccggaatcttgcggtgcagatcgcagacaaccctctgcgctagccagagcaaccaattcatcgactcgtgctcgactcgcgcaggcaacgccgaggtgtccgaaaggccctaacgctgtgtcttttagctccggagattgcactagaacgatagcaaaggggcgactgtgatcggtcatccatgctacttccataccgggtttgcctcctgcccgacggtgaaccagggtcattccggcgtagcgctgatagaaatccagactgatatcaatatcttgcaccactaatgcaatgtggcttagccctaaatcgagcgaatgattggtatcgattacagtggttgtcataagtatttctccggttaataacttgaggttctcttcaccggtcaaatgattcattattcactcaatgattgataatcgatattttatctagtgagtattcattacatgaataatttgcgtgccatagatcttaacctgctggttatattggatgttttgctcattgaacggcacgtatcccgagcggctacgcggttgcacatgagccaaccagcagtgagccacgcgctgaatcggctacgttatttgctggatgatccgttgctggtgcgtgcgcccggtggttttcagcttacccgtcgggcgcttgagttagttgaacctttgcagcaggtcctggagcaggttcgacaattggtaggttctgctcaatttgttccagcgcaggctagccaaagctttcgcatggcgttatctgattatggtgcagccattgtgctgccggggttgcttcagcggttacgccagcaggctccgggcatcgatctggtggtggtgcagctcagcagggagcagatggttgagcaagtgcttgcggggcagttagatctggcgctgggtgtgtttccccatttgcccgctgggttaagcagttgcaggctatttgaagaacattttgtctgtgttgctgatgcgaatcatccattggggaatgaaaagcgcctaacgctagatgattatctggctcagccgcatttgctggtttctatgcgtggcgaaagtgcgggagaagtggaggcggcactgacggaattgggccttcgacgacggattgccgcaattatgccgcactttctggtggcaccgcaggcggtggtggggacggatttacttttgacgatcgccagccgggtcgtagcgactcagccagaatcaatgaggctacaacgccttgagctgccttttgtcgtaccgagctttgattttgtgcaaatctggcatccacgtaatagtcacaaggaagatcagcgttggctgcggcagcaggtggtggaaagtctctgaaaacgagcgccccggcgaggaaagaaaaatccggggcggttaaagcggttagaaagtcgcgcggcgaacgtccgtgcagccgatagccgccagcgtggcctgagttgcatcccactggcttaataccggcgttgcaggttcagccagaaccgcgcggcgcacagtcagacaatcgctaccggacatattcatcagaatcagcgaggcctgaagtggaggcaagcttgggttaaaagcggcattttccgcatagcgtccggcgaaaattgccccctttgtatcttccagagcgacgccgctgtgcgcctggctataaggtgcatggctgcggttagcggcctccagagcggcctgagccaaagcgtcgctatcattaaggtgataaccgtgatcgaccgaatccatcaataatgtgctgatttccagatcgttagggccaaatgaatcaggcagatagtcaccaagcgttgccgctggacgacctggtagatggatatgtaaaccggtgccgctgtttaattcattcataaactgacgacaatgaccgcacggagtgtaatttacggtaatggagactaaaccgccttctccccgcagccaggcgtgggtaacggcacactgttcggcgtgaatggtttgttgcagcggtgcgccgttgaattccatattggcaccgaaatacagattgccgcttttaccgcgagcgattgcccctactttaaaatgggatatcggcgtgagtgagcaggcggcagccagcggtaacagggcgaatgccagttctgcatcattcagcccactgagagtttttaccgtttcgacttctgcggcggtaagcattgcagggaaatgatcgttgctcagcagtggctccagggcggattgcaatgctgttggcagctctgccagtggggcgcgaaaacgtgcttgcatagaaattctctccaatattaacgggaaactattttaggcagcttgcgcactcttaattgtgatgtagatctcgttgtatatgaaatttatgcaatgaatatattaaatgagagatttatctcaaatttatatgcttaaaattgcttatttggtgttcattgcgcttatttagccgattaaacctgtttgaccgaatagcctgtttaaccgaataaatgcagcaatatcgggaacaggaacggagccaacaatgaggtaatgatcccgcaaatcaccaatgccagtgagctaaatgcgccttcttgaaaatcgacttcagcgcagcgggcggtacccaatgcgtgagaagcggtccccatagctaacccgcgggaggctttagtgacaattcttagccgattaaacaaggtatggccgaatactgcccctaaaattccgacaaaaatcacgcagacggcgctgatagccggaatgccgtttatagaatctgccactgccatcgcgataggcgtggtgacagacttcggtaataccgatgcggcgatctccggtgttgctcccatccataaggctatcgcggtgccgctgaccatcgccgtgatgctgccgataaaacaaatggtgataatggatttccagcgtgcgcggatctggtgcaattgctcatacaacggaaaagcgagcgccactactgctggttgcagcaggtcattcagaattttgctgcctttaaaataattggcgtagggcatatgggtcagcagcagcaagggaatgatgatgaccatagataccagcaatggattgagcagtggcattttcaaccaaatcgccagcttacgcgcgccaaagaacaccagcagcgttaaaggcagcgaccaccagatatgctccattatttgtcctccgactgttcatctaccgaaccgacgatcttgcgttcccgatggacaaactgcgagctgtaacccaccacgatcatgaccactaacgtactgataaaacacgacacaataataggaccaaactgtttactgagctggtcgtaatactgcatcacgccgacaccaatcggtacaaaaagcagtgccatatagcggatcagaatatgacagccgggtttgacccagcgagacggcaggatttgcgaagacagcagggcgaacagaatcaacatgccaataatactgcccggaatggtcattggcagcagcgcggacagtgcgttacccgcccataaacacaggtaaataaagataaaggcccgtaggtattgccagcaaagtgtaatcacattgcgcataataagtgtcctaagtaacggaggcattcatcatacaattatgccgagaaatgtgctaccgatcacaccatgaattatatctatgcttttatgccatttgcgatggcacactttcgtgacgctggcatgactcgcgcccggttgggctagattttttctgatgattgattaaatacattatcctgcgcttttgccaactgataaccgcgatagaaaaaggccaaaccgagtaatgctgccaccatcagcatcacaaacatcatttccggcgcggcgtaggccagcaaaaatccgcacatcaccggattgatagctccccccagattgcctagattttgtgccccgtaatagctgcctttcaaattcgcaggagcaatgaagtcgatgaataaatactccactggaatcacgataatctcgccaaaagagaagatggtcatcgctagcatccacatcggaatagaaccctgagcggtcataaagcctaacagacccacaataaagaacagagtaccgagcatcagccagcgtattaggttctgctgattcatacgacgacttaataaatactggaacgcaatcacaatcacggcgttgaccgtcatgatcgaccctatcacctgataggcaaatttcgcgttggaaacggtgatcaaatattgcgaaaggtagccagtaaattgcccgaagacgacggcgctcaacatgctgccgagcgtgaaatagaccaagcgtttatcctgacgcagaatgcggaacgtttgggcgaaattcagcggcgcaacgcttttgagttcaagactatcttcccgctctggcgggatgccgaatttgtctaacagaaatatcagtgtgatagcgacggctaaagccaggccaccagacatcaaaaaaggcagcatagggctgaacgccgccatcagcacgcccagcgccgggccaaccgcccagccaacgttaactaacgtatagtttgcagagaaagctttgatgcgctgagccaccggtagccaatcggcgaagcaggctttgaccgcaatgctaaataccgaataggccgaatgtagcactgccagcactaaaataatccacgccggttgttcaatccacggcaaggcaaagaaggtgagggcaaacagggcaatagccacaaaaatcagatgatttttattaaacttatcgaccagaaaaccgccgtacaggctggcaataatccccagagtcaggctggcacccaaaactaaaccgacgcgatccggcgctagctggaagtgttctgccagataaatggtaataaagggcaacgtaatggcacgcccaatagtcaacactaatgaagacagcagaagtgtgaccaccaacggaggaaatcctttcatagtgttatctttttattatgttaattgaatgtgacaatggctcaggcagataccatagacgattgtaataataaaaagagagggggaacggaaaatatttttagaaacagcagatcaacctgaatcgatccgctggtagcagcgcgttatcctaaatattcgataatagaaagaccgccgttgtaatccgtactgtagataattccttgcgcatcgacaaaaacatcgcaggattgaactacctgcgggcgatccggtcgcttatccatcattttagtcggcgcagcgggcaccaatgcgccggtttccctcggctggtatggattactgatatcgtaggctcgcacaccggcattttggtaggtggcaaaaatcagcgacgagctgataaaactgccgggacggttttcatgcaaattatgtgggccgaaatgtgcgccttttttgacgtaatcccgttcatttggtaccggaaaggtggaaatactaatggggttactcggctcgcgaatatcaaagacccaaatgtgcttttccccgtcttcctgattatccaataccgcttcgtccaatacgatcaacagatttctgtcaggcaacggcagtgcagtgtgagtgccaccgccaaaaggtgggctccagttacgatggcaaatcagttttggctggtagcgatcgctgacgtccaacagcgtcaaaccgccgtcgcgccagcttccgtaggcggtatccccgctgataatggcatggtgcagcgcatagcgctgaccgtctggccagcttggtgtttctccgccagcgctatgcatgcccggtagccaataacggccagccaccgctggattgcgtggatcggccatatcgatagtcaggaaaatataatcgctgtaaccatccaataaggctgaaacgtaggcccaacgtccgccaacgtaaactattcggtgaattccaattccatccaacggtaaaaagccgatttgtcgcggctggtcgggaatggaaatatcaaaaattcgtaagcccgcgctccagtttcgctccccctgccgggtattgacggttttgcctaccgattgagtgtaatagactttttcctcggcaaaactagcgtcagcaaacagatctcgggcattaatcaccaatagcagatcgtcgtgagtttgtagatgcacgttccaagtattcggcggcgcagggataaaaccgctggggcgcggattttttgcatcccgaacgtcaacgattgatacaccttgagaaaccatatggccgatataggcgtagccgcgatgcaccatcacctgaacgccatcaggccgcccgccctgatcgctatggccaatcagccgcatattgcggctgtattctggctttggtagcgagctgtgggttgtcataagtttgctccgcggttattgaccatttttggccgccagcgtggcgaaccaaggggaattaaaatcgtcagattgaccccagcccggaataattttgctcagactggcgacgttaaccggccccggctgactggcgagcagagcctgaggaatggcggccgcgcggaattcataggttggcggagttgcctctccggcaatttttttcgccaccaaacgcaggttaaccgccccaattaacttaggatcaaccgctacgctgactttccatggactatttgcttcgcgcatcaattgcaaatcttgatttgaaatatcaatgctatacagtttgatctcatcgcggccattttctttcaatgccttgtaagcaccttgagtaaaggcatcccaggtgccccaaatagcatcgatttttccttttggatacttcgccaaaaccgcgcccactttattcgccgtgtctccctgtacgtcagaggagacggcaccgatagattccagctcatgaatgccaggatgctgttttagcagcgcctgataagcggcctggcggcgttccatcggcgggaaaccggcaacccatagcttgataatattggcgttgccgttgaaatctttcactaactggccgaatgattcgttagttaatgaggcgtcatcttgctgcgtgagggtaacgccgggaatattgcctgaaaccgcggtatcaaacacggataccgcgatgccactggcggcaatacgtttcaccagttcggtagaatagggatcgcggccttgagacaagataatgccgtcgtatttttggctaatagcctgattgacgaaatcctgaaaacgcgcgtcatccccgttactgaggaaggtatcgactttaaaacccagttttttaccttcttttaatacgccggaaaggaactgagtggtgttgtcatccgaacccaggttgcggatgaccgcaattttaatttgtccctgatgattagcgatagcgtttggcaccggcgccaatgtcgtgctttcggcggcaaaaagcggcagggtgataagcaggctcaaagccagcaaagggggggcaattttcttcatcaggggctccgttgtgatgttggtaatgtgtgcaagcaaagggtaattgattttgtttttatggctacctttacgtctggacgtccagatggtgttttgcatcataaccaattattttttgataaggaattaactttgttatgaatttttggatttatttatatcttttagtttggcagcagtcgtcacgccgtttgcagcaattctgttagaaaaaggcatatcggcggaaagctaaaaaccagctgaaaagcgaggttagtcgactatcggaaaaggtgatgaatgggtactgcgatatctattaaggatcgcagaacagagaaaaaccttgtgaataacaatgttgttttggttttccaataagtacctattgatagcactgcattttttctatttttgaattatctacggtattattggtcagatattgacgtaaagtttatgtgatgttcattaagtgaattaaataaataaaaactaaacagtagttaaacaaaatggcttatgccagcctcctgttagtcaataaaaatagacagcgctaagggaatagaagtcaccatgggtaaagttagcaagctattcaatcggtctggagccgataaccattcgatatttaactatactgatgcaggaaacttctactcgggtttgagtgataacttatctttctactctatgtcgcgtggagagttttttattgtttttatgcgctatatattggtgcaaccgttgctgctgattttgctggatgtgttatggccagagcagtttgatgatttaatcgttatttccgtacagtcgtggccagcgctcttgtctttggtgctgctgatgccgtgctactaccgcctaagatcacagggtttaagtccctacctgctcctggtgcatttgtttccactgattagctatcttcctcaaaatatgtttacgctgcctttatgcggcgcatttatactttatctgttatttatcaatatttatccgggttatcatttggactgtgagcggaaaacagaactgaagaatgagcaaccaggagaatatccatttggattgacgtttgtttgttttttagtcttgaatttattaccctttctttatttggatatggatgacgccgccattttgttaattatggtttcgtggatctctttcctgttaaccaagtttcactggccagttgtggtgataaatattgttggttctgtgggtgtttttcttttcctcagctctgatttctcagatttgaagcatcataagaatattattattaatgcggtgataaaaatatcactgttggattcagtgttatttctgatgttttccctcagcctgttcctgaatatgttgttctggctggaagagtaccagcgggataaagggaaagtggtgaagcaatagcgagagtaataatactctttatttcaataggataaaaaaatgccggtcaggtttcccctccggcatttttatttcttgccagccacactaacccggctggcaaactcagaacttatttaacctgcataccaggctgagcgccgctgtctgggctaagcaggaagatatctttcccacctgggcctgcggccatcaccataccttcggaaataccgaagcgcattttgcgtggagccagattagctaccatgacggtcaagcggccttctaacgctttaggatcgggataagcggagcgaataccagagaatacctggcgagtttcaccgccaagatccagagtcagtttcagcagcttatcggaaccttcaacgaaatcagcttgtttgatcagcgcgatacgcatatcaactttggcaaaatcatcgaaattaatagtgtcctgaataggatcatctgccaacgggccagtaacgacggcggcgggtgccagattttctttagaatcgccaaccatctcgtttactttatccagatcgattcggttaaacagcgctttaaacggactaatctgatgatttagcaacggttgctcaatactattccaggtcagttcggtattgaggaaggcctcagtacgttcagtcagcgcgggcagcacgggtttcaggtaagtcatcaacacgcggaacaggttaatgcccatagagcaaatagcctgtagatcggcatcgcggccttcctgcttcgcgactacccaaggtgcttgctcatccacatagcggttagccacgtcagccagcgccatgatttcgcgaatggctcgaccgctttcacggctgttgtaagcctcggcgatagatgctgctgcatcgataaaggtctgatatagctcaggatcggccagtttatcggctaatttaccgtcgaaacgtttattgataaaaccggcgttacgtgaggccagattcaccactttattcacgatatcggcattcacgcgctgtacgaagtcttccagattcaaatcgatatcatcgatgcgtgaagacagtttcgccgcgtagtaatagcgcaggcaatcggcatccagatgtttcaggtaggtgcccgctttaataaaggtgccgcgagacttcgacattttagcgccgttaaccgtgacataaccgtgtacaaacaggttagttggtttgcggaagttactgccttccagcatggccggccagaacaggctgtggaagtaaacgatgtctttaccgataaagtggtacagctcggtggtggagtcttcacgccagaattcatcgaaatccaaatcgccgcgtttgtcgcacagattcttaaatgaacccatataaccgataggcgcatccagccacacatagaaatatttacccggcgcgtccggtacttcaaaaccgaagtaaggtgcatcgcgggagatatcccattgttgcagaccggaatcgaaccattcctgcattttgtttgccacttgttcttgcagtgcaccggagcgagtccaggcctgaagcatttcgctgaatgcaggcaaatcgaagaagaaatgttcggattcacgcattaccggcgtagcgccggaaacggcagatttcggctcgataagttcagtcgggctgtaggtcgcgccgcagacttcacagttatcgccgtattgatccggagctttacacttcggacaggtaccttttacaaagcgatccggcaggaacatgcctttctcaggatcgtacagctgagaaatggtgcggttcttaataaagccgttttctttcaaacgacgataaatcaggctcgacagctcgcggttttcatcactgtgagtggagtgatagttgtcgtagctgatgccaaaaccggcgaaatcctgttggtgttcctggctcatctccgcgatcatttgctcaggttcaacgcccaattgctgtgctttcagcatgattggcgtgccgtgggcatcatccgcacaaatgaaatgaacctcattgccgcgcattcgctggaaacggacccagatatcagcctggatgtgctcgagcatatgaccgagatgaatagaaccgttagcgtatggtagcgcgcacgtcaccaataattttttcgcgacttgagccatagtaggaaattgctttctgtaataggaataaggggtctttgatgttaaccgattcggccggttgtcgctagggtcagcggacgactggcggcgcttaagtcaaatcagcgggctttgacgcagtttttctttatgaactccacgcgattagccgagttctgatatgctaaagcttattgtctttaggttaataacgataaattcaaggagccgggatgagcccaaaatcccccgagcagaccacccctgacctgctgcaatctcaagtttccaaggtgcttaccaccttcacccatccgacgctgcaaaaagacctgatcaccctgcgcgctttgcatcactgtgcgctgttggataatgtgctgcatatcgaactgattatgcctttcgcctggcaatacggatttgaaacgctgaaagaaaccgtcagcggtgagctattacagctaaccggtgccaaggcgatcgactggaagttatcgcacaatattacgacgctgcgccgtgccaacgatcagccgggggtaaaaggcgtgcgtaatatcgtcgccgtcagttccggtaaaggcggggtagggaagtcgagtaccgcggttaatctggccttagcgctaattggggaaggcgctaaagtgggcattctggatgcggatatttatggcccgtcgattccaaacatgctgggtacgatgaatgagcgcccaacttcgccggatggcaagcacatgtcgccgatccaggctcatgggctggccactaactctattggttatttggtgacagacgaaaacgccatggtgtggcgcgggccgatggccagtaaagcgctgatgcagatgttgcaggatacgctgtggccggatctggattacctggtgatcgatatgcctccgggcaccggcgatattcaactgacgctttcgcagaatattccggttaccggcgcgctggtcgtaaccacgccgcaggatattgccctgatcgatgcgatgaaaggcattgtgatgtttgaaaaagtgaatgtgccggtgctgggtattatcgaaaacatgagcatgcatatttgcagcaactgcggtcatctggagccaatattcggcaccggtggggcagagaaactggccgaaaaatatcactgcaagctattggggcaaattccactgcatatctctttgcgtgaagatttggatcgcggcgaaccgacggttatcagtcagcctgacagcgagtttaccgatatttatcgccaacttgcttcaaacgtggcggcagaaatgtactggcaaggtgaagccatcccgacggaaatttctttccgcgcgctataagatcttccctagagccaaaatggcctgtccgtgccttacgcgcaggccatttattctttcagccaggttttagccttaaaattctgctgccaatgggcttatttccccattctgccaaataattcacctatctggcctgcattgctacgccttagcgctggcgtcatgccagtgaactccttataattggcgcgttcttagcacccccgtgctttgccccccttcacactacgtaatcaggtctttaattttatgactgacaaggcacatcagtgcgtcattatcgggattgccggcgcatctgcctccgggaagagtcttattgccagcacgctgtatcgcgaattgcgtgaacaggttggcgatcaacatattggtgttattccagaagatagctactacaaagatcaaagccacctgtcgatggaagagcgtgttaaaaccaactatgaccatcccaacgctatggatcacaatctgctgctacagcatttgcaatcgctgaaagcgggcaccgcgattgaattgccgctgtatagctatactgaacatacgcgtaaagaagaaaccgttcgtctcgaaccgaaaaaagtgattattctggaaggcattttgttgctaactgatattcgcctacgtcaggaaatgaacttctctattttcgtcgatactccgctggatatctgtctgatgcgacgaatgaagcgtgacgtgaacgaacgcggtcgctccatggaatcggtgatggcgcagtaccagaaaaccgtgcgtccaatgttcttgcagtttatcgaaccttccaagcagtacgctgacattatcgtaccgcgcggcggcaaaaaccgtattgccattgatattctgaaagccaaacttagccagttcttcgagtgatatccgtctggatctttgctcttttctatggcagtttttgtaacatacgaatttaaatggagatttgatcgatgagactgtgcgatcgtgatatagaagcgtggttggataatggcaagctggttatcactccacgtccgccggtagaacggatcaacggcgctacagtcgatgttcgcttgggcaaccaattccgcgtatttcgcggtcatacggcggcatttatcgatttaagcggcccgaaagatgaagtcagtgaagcgctggatagagtcatgagcgatgagattatcttgccggaaggtgaggcattcttcttgcatccaggtgagctggcgctggccgtaacccacgaatcagtcactattcccgatgatttggtcggttggctggacgggcgttcctctttggctcgtttagggttgatggttcacgttaccgctcaccgaatcgatcccggctggcaagggcgtattgtgctggagttctataattccggtaagctgccgctggcactgcgtccggggatgttgattggcgcactgagcttcgagccgttatctggcccggcagcgcgcccgtataacagccgtcaggatgcaaaatatcgtggtcagcaaggggcggttgccagtcgtatcgataaagactaagtcgcgttagcctgtattcctgtttggacaagaggacgtcatgagaagattactgacaacgttagccatcttgctggtggtattagtcgcggggatgagcgcgctggtacttctggttaatccgaatgactttcgtgcctatatggtcaaacaggtcgaaaaaaataacggttaccgactggcactggaaggggatatgcgttggcacgtatggccgcgcttaagcattatttctggccgaatgtcactcacagcacccggtgctgatgcgccggttgtcagtgcagaaaatatgcggctggatgtcaaactctggccgctactctctcatcagctagcggtaaaacaggtgatgttgaaaggtgctgtggttcgcctaacgcctgatagcgaagcccgtttacagccagatgcccctgtggctccggcgggaaatgcgccggtaacggaaagcacatcctggaagctggatattgataaggtgcaggtggccgatagcctgctgatctggcagcgagatgctgaccaaattaatgttcgcgatatcaatttattactcgagcaaggcccgcaacgtcaggtaaaagtcaacctgagcagccgggttaaccgcaatcagcgagatctgacattctcccttgacgccgacgtggatatgcaaaattatccgcaacatatgggcgcgaaagtcagccagtttacttacaaactggatggtgccgacgttccggttggcgggattgctgggcaaggttcgctggtggcgacctaccagcaaaataaccagcaggtcagcattgagcagcttaacgttagtgccaataataatgtgctaaccggcagcgttcaggcgcggttgggctttattcctcactatgatctggatctgaaaagcgacagtctcaatctggatcaactgtttggctggcaggcaaaaagcgcggacacttcctcatctgccagcagcagcaaacctttggtagccgcagcgccggttattgccagtcaggaaaccgacgtgggtcgggatttacaagggctgcgtgatttcactgccaaactggcattaaccgcgaccaatctggtttatcgcggaattagcgtgaatcaatttaacgtgctggcggataatcagcagggaaaactgtcggtgagccgtctgtccggtcaggcattaaagggtgagttttctttccccggcactttggatgtcaccggtaagcgcttactcattgctgttgaaccaaccattaatcatgtggatctggggccggtgttacaggctgcggaattgccattggtcctgactgggcaattctcgatgactggtcagttatccggcgaagggtttggcgtggagtcctttagccgccgttggaacggcgatgcgaaactttcaatggccaatgcccaactgcacggcattaatatccagcagctaatacagcaggcggtcacgcgtagcactagcgacgtgaccgcggcggagcgtcttgaacgctataccgaagtcagtcgtctacagactcaattggcactcaataaaggtttattgaaagtcagcgagctgaacgcggattcggctctgatttcgctaaaaggcaatggttcgctgaacttaccggggcaacaagccgatatgaatttggcggtccgtgttattcagggctggaatggtcaggataagctggttaaaacgctgcaaaataccgatattccgctgcgtatttacggcccgtgggcgagtttgaaatatcagttagacgtagagcagttactgcgcaaagaattgcagcaacgagcgaaaagcgctctcaatgaatgggcggagcgtaataaagataagcgcaacggtcaggatttgaaaaagttgctggataaactgtaattacatttcgggttggcagtggggaatccggctgccagcctattttggttgataaattgttattttattgtttgtacctctaacgtttttcccccttaaagctagacttctcatcacagattccctcttctgtataaaatccctgcttatccttgatagatgtcataaactcgcggactgactttaggcagagtgcagaacgtatttttgtccaattcacgaagaaaataatacccggatgcgctaagttccggcctgtatcgggtaagagaggattaatgttggatctattgattggggtggttgtggcggtaggcgttggccgctatatcattaagggctattcagctactggggtgctgatggtcggtggtttactgttgctgataatcagcgcactgatgggaaaaagcgtgttaccggccagcgccacgtcaaccggctggcgggctactgacattgttgagtatgtcaaaatcctgttgatgagccgcggtggcgatctcggcatgatgatcatgatgctgtgcgggtttgctgcctacatgacgcacattggtgccaatgatgtggtggtgaagattgcctccaagccgctgcaaatgattaactcgccgtatttgttaatggtcgccgcgtatattgtggcttgcctgatgtcactggcggtttcttcagctaccgggctgggcgtattactgatggcaaccttgttcccggttatggtgaacgtgggcattagccgtggcgccgcagcggcaatttgcgcctcgccggcggcgattattctggctcctacttctggtgacgtcgtgctggcggcaaaagcatcggaaatgccactggttgatttcgcttttaaaacgactttgccaatctctatcgccgcgattgtttgtatggcgatagcgcatttcttctggcaacgttacctggataataaaagtcaggaaaagcatgaaatgatggatgtgaatgagatcacaaccaatgcgccgagcttttatgccattttaccctttacgccgattattggcgtgctgatttttgacggaaaatggggaccagagctacacattattaccgttctggtgatttgtatgttgttggccgcggttattgaatttgtgcgcagtttcagcgctaaaacggtattcgccggtctggaagtggcctatcgcggaatggcggacgcttttgccaccgtcgtaatgctgttggtggcggcgggcgtatttgctcaagggctgagtacggttggtttcatcagtgggctgattggactagctcaatcctttgggactggcggcatagtgatgatgctggtgctggtcactattaccatgctggcggcaatgactactggctcaggtaatgcacctttctatgccttcgtcgagctgatcccgaaactggcggctcaaatggggataaacccagcctatctggttatcccgatgctacaggcgtcaaacctgggacgcaccttgtcaccggtttctggcgtagtggttgcggttgcggggatggcgaaaatatcaccgtttgaagtggtaaaacgtacttcagtaccggttctggtcggattggtggtggttatcgtggcgaccgaaattctggttccactgcgttaagacttaaatagattaagcagttagacagggtgttaaatggatagcgtcaggcataatacgtcagagcctgacgctatcggcagtttcatttcttatacttcgtcgtccggttccggcactttcagcggagtaattttcacttttagaatccggtggctgctcacttcctgcggctcaaacagataatccccgatctgcaattgctcaccgacctgaggaatacgctgggtgtgttccatcaataatcccgccagcgtgtgatattcccttttttcatcaataggtaagggtaaatacatcaccaaatcctcgagcggcatataaccgttggcaatccaggtaccgtcatcgatttgctgaatatcatgacgagcatccggtacttcaccggctaccggcagattaccagcgatggtttccatcacgtcggttaatgtcactacgccttcaatggatccaaactcatcaaccacaaacgcgaaatgggtttgcgcctgacggaactgctccaaagccattagcagtgaaacttgctcagggaaaatcagcggctgacgaatcagtgcgcgtaaatccagtttctcttgcgaaagctgctgttttaataggtcaataacgtgtacgacccctaaaggctcgtcggtggtgctatcttcggtcaccacaattcgggtatgcagatttttagtcagcagagcagttagtttttccggtggatcgttcagatccagatattccacgtcgtggcgtgaagtcatgatgctgctgaccgttcgctgagctagtcccaatacgcgctcgatcatgcgccgttcctgctggttaaagacttcctgattttggcgcccttgatctgcaatcaggctggcggtgtggttatccagcccggcttcttcatgtttaccactcaagatccgcagtaccgcttctgcggttcgttcacgcagaggacgcgccgaggtgaggaaacgacggcggttaaactgcgcgaactgattcagtgattcaataattactgagaaaccaatagctgcatacaggtagcctttcggaatatgatagccaaaaccttctgcgactaagctaaagccgatcatcagcaggaagcttaaacacaaaataacaatggttggatgcgcgttaacaaaacgagtcaatggcttgctggccaatagcatcatgccgatagcaatgattacggccgccatcatgaccgccaaatggtcaaccattccgaccgcggtgatgacagaatccaatgagaaaatggcatccagcaccacgatctgcgccactaccggccagaattttgcggttttacgctgattattttgctggtgatctttaccttccagccgttcatttagctccatagtggctttgaacagcaggaaaatccccccaatcagcatgatcaagtctctggcgctgaaagggtgctcggcaagagtcaccagcggtgcagtgagcgtcgccagccaagagatgcaggccagcagtaccaaacgcatcgctaaagcgcaaagcagcccggtgactcgtgctttatcccgaagatgacgggggagtttatctgccaaaatggctataaagatgaggttatcaatgcctaatacaatttctagcacgattagcgttgccaatccggcccaaattgttggatccatgatccattccatatgcccagtttcaccttctatttctacggcttatgccgcagtcagaataatgggcgctgatcgggtaaaattcaactctcaatagcctcggggccaagaactgcgggggaattgaccgaagtgatgagtcattatccgaaaattagacaggtatatcgtaatgaggctgagattatcctaaggtaaagttaattagtgggttagcctattgtttacatgatctagaatgaacttaataagcaacatggttttatcggtgacagatgcaaaaaaaatgacgatagataccttgcttgctaatatatggcggataaatatagagtgatttttactcatccatttatctgatttgtaatagattgagatacatttttgctgtggaactgacctgtttaggcatacattctcactcttgctaaaaatgtgccaccgcactgaatttaactggttgatagctcgccgcagtaggttgtctgagaataaggtagggcagatgaagaagaatttgaaggctgtaattcctgtggctggtcttggcactcgaatgttgccagcgaccaaggcaattccgaaagaaatgttgccggtcgtggataaaccattgattcaatatatcgtgaatgaatgcgtagccgccggaattaaagatatcgttctggtcagtcactcatcgaaaaatgcgatagaaaaccattttgatacctcatttgagctagaagttacgctagagtcacgagtaaaacgacagttacttaatgaagtgcaaaatatttgcccgccggatgtcacaattatgcaagtgcgtcaggggcaggccaaagggctggggcacgcagtgctgtgcgcgcagccaatggtcggtgattcgccttttattgtgctcttgccggatgtgttactggatgattctactgccgacctgtcgcgggaaaacctggccagcatgattaagcgttttgaggaaaccggccatagccagattatggtggagcctgttccgcagcaagatgtgtctaaatacggcattgcagattgcggtaacgtgaaactgcagccgggcgacagtagtctgatggccgccgtagtcgaaaagccaagcgtggcggaagcgccgtcaaatctggcggtcgttgggcgttatgtgttgtccgcggatatctggccactgctaaagaaaacgccgagcggagcgggcggcgaaattcagctgaccgatgctattgctatgctgatggagcagcaaccggtagaagcattccatatgacgggcaaatcccatgattgcggcgataaacttggttatatgaaagcttttgtggcctacggtgttcgccatgatacagaaggcgaaaaattctctgcctggttaaaacagcaaatagacgcataacgcagaatccgcgcgtaatttttgaataacaggctttatttgcatgaaaactcgttaggtgaatatgactaaattaaaagcagtcatcccggttgccggcttaggtatgagaatgctgccagcaaccaaagccattccaaaagaaatgctgccaatcgttgataagccgctgattcaacacgttgttaacgaatgtgttgccgcaggtatcaccgatattattttgatcacacattcctcaaaaaatgccatagaaaaccattttgatacttcctacgaattggaggcgatgctggaagctcgagtgaagcgccagctgctggaggatgtgcaatctatctgcccgccgggtgtaaccattatgcatattcgtcagggtcacccggaaggactcggccacgcagtgctgtgtgctaagccgctgatcgacggtcaacctttcgtggttctgctgcctgacgtcctcattgatgacgctaagtctgatttgaccaaagataatctggctcagatgataacgcgttttgaagataccggcgcaagtcaggtgctggttcagccaatgtctgttgaagagctgccaaactactcggtcattacctgcgaagcgccggggctggctccgggtgaggcaagcccgatagtggatatgcaagaaaagccagaaaatctgaccggaatgaagtcaaacctgtcagcggttggccgttacgttctttccgccgatatctggccactgttagagaaaaccgaaccgggtgcctggggacgtattcagctgactgatgctattgctgcgttgaatgctctacaaccggtggatgcggtagcgttgaccggtcaggcttataactgtggcgaaaaactgggttatatgcaggcctatgttgcttacggtttgcgtcatccggttcagggggatgagttcaaggcctggttaaaggattttgtgtcttaatccgctgaaatgatcgtaaatcaggcaaccgttaggttgccttttcttttgggacggcgattattttgcctcaggcaaacgactgcgtacagcaactggccggttgtgctgtctatcgcaccaatcactacccacctgacataatcctgagttaacatgtttcccactgcaaaaacctgcgggcttatcggccaatcgcgggtgtcatcctttagacaggagtttttttaatgtccaaacaacagatcggcgttgtcggtatggcggtaatgggccgtaacctggcgcttaacatcgaaagccgcggctattccgtttccatctttaaccgttcatcagataaaaccgacgaagtggttgctgaaaacccaggaaaaaatctggtgccgagttataccgttgaagagtttgtggattcactggaaaaaccgcgtcgtattttgctgatggtgaaagcaggtgaagctactgacaaaactatcgcgtcgctgactcctcacctcgataaaggtgacattttgatcgacggcggtaatacctattacaaagacaccattcgtcgtaaccgcgaactgtctgagcagggctttaacttcatcggtaccggcgtgtccggcggtgaagagggtgccctgaaaggcccttcaattatgcctggcggtcagaaagaagcttatgaactggttgctccaattctggaaaaaattgccgctcgtgctgatgacggcgaagcctgcgtagcttatatcggcgctgacggtgctggtcactatgtgaaaatggtgcacaacggtatcgaatatggcgatatgcagctgatcgctgaagcttattctctgctgaaacaagcgctgggtctgaataatgaagaactggctgcgactttctccgaatggaataagggcgagctgaatagctacctgattgacatcacaaaagatatcttcaccaagaaagatgaagaaggtaaatatctggttgatgtgattctggatgaagccgcaaacaaaggtaccggtaagtggaccagccagagttctctggatctgggtgaacctttgactctgatcaccgagtccgtctttgctcgttacctttcttccctgaaagatcaacgtgttgctgcatctaaagtgttgaccggcccaacggttaaagctttcgaaggtaataaagcagagtttatcgaaaaagttcgccgcgcgctgtatctgggtaaaattgtttcttacgctcagggcttctctcagctgaaagcggcttccgacgagaataactgggatctgcactacggtgagattgctaagatcttccgcgctggctgtatcattcgcgcgcaattcctgcaaaaaatcaccgatgcttatgcagataatcctaagattgcaaacctgctgttggctccttacttcaaacagatcgctgatgaatatcagcaagcgctgcgtgacgttgcgtcttatgcggttcagaacggcatcccaacgcctaccttctctgctgcaatcaactactacgacagctatcgttctgccgtactgcctgccaacctgattcaggcgcagcgcgactacttcggtgcgcatacttacaaacgcactgataaagaaggcgttttccacactgagtggatggaataattgcttagtttagcgatataagcgtgaatgcatgatatttggcagcgcccatcattgtaactgataatccgttagcctgatgatgtgagctgcccgtaatagaacgtttcttgcaaactatgccttaatctgtaacagcaatagccagatttcgctaacgaatagatagttctaatgatgtattgaccagatctgtcgtaataaacagccctcgcagattaaaatgtgagggcttttttacgtcgaaatgccattgataacgggaaggctatttctcgtggcgttcccgtaggcggccgatcactttactgagatccaaattctgatcttgcagcagaaccagcaaatgataaatcagatcggacgcttcattcgtcagttcttctcgatcgtttaccgttgccgctagcgcggtttctacaccttcttccccaactttctgggcgatacgcttggtgccgctggcgtagaggctggcggtataagaactttcaggatcggcgtttttacgttcagctagcaattgttcgagctgatacaggaaaccccagtcgctagctgccggcgaaaagcagctgttattgcctaaatggcaggttgggccaatcggattcactaaaatcaagagggtatcgttatcgcagtcagggtagatattgactacgttgaggaaatggccagagctttcgcctttagtccatagacgctgtttggtgcgggagtaaaaggtgactttgcctgatttctccgttgctgccagcgcttcccgattcatgtatcccatcatcagaacttcaccggagacggcatgctgaacgatagcgggcatcatgttatcgacttttttccaatctagctggttgatctgttgttcagttaacacactcttatctccacgccttgttcagacaaataggtttttaactcgccaatattaatgatctgtttatggaataccgatgctgctaaagcgccatcgacgtccgcatcgcggaaggcttgcaggaaatgttccggcgtacccgcgccgccggatgcgatcaagggtacacggcaaatggcgcgcatttgtttgagctgacgtaagtcatagccgttgcgtactccatcctgattcatcatattcagaacaatttcaccggcgccgcgtaactgtacttcacgaatccagtcttcggtttgccaggtggtggctttggtgcgtttttcatcgccggtaaattgataaacctgataactatcgctttcggcgtcgtaccaggtatcaatcccgacgacgatgcactgtacgccatagcgttcggccaaacgagtgatcaaggttggatcggccagagccggagaattgatagagatcttatctgcgccgtaagtcaggatctggccagcatcctcgacgctcttaataccaccagcaacgcaaaaaggaatatcgatcacttcggcaacgcgagctacccagcttttatccacgacccgaccatcggatgatgcggtgatatcataaaacaccagttcatctgcgccttctgcggcgtaacgctgtgccagaggaacgatatcgccgatgatttcatggttgcgaaactgaacgcctttgacaacctgcccgtctttcacatccagacagggaattatgcgttttgccagcatgcgatcgcctccttcacattaaatttaccgtctagtaaggcgcggcctacaataacgccttgtactccgctggagcgtagtctggcaatatcgtccagacagccaatcccaccagaggcttgaaaagccacttgtggatagctggcgcagacttcctgatacagttcgacgttagaacctgccagcgtgccgtcgcgagatatatcggtgcaaaggacgtgtttcagaccaaaaggcaggtattgttcgataatttgttctagtgtgacgttggagttttcctgccagccgctgatagctacttctttacggccggttttatcaatacgcacatccaacgccaggacaatcgcatcggctccgtaacgttcaaaccagctctgtaccaactctggctgcctgaccgccgttgaaccaatcaccacgcgggtggcgccagccttcaacaaggctgctacatcctgttcattacgaatgccgccgccgacctgcaccggtacttctacgccggccagtagctcacgtaataatgggatctggcgggccgcaggatctttagctccggttaagtcgaccagatgtaaaacctgcgcgccttgctgctgataatcctgtaaacgcggcaatgggtgattgccgtaatcgcgctgttggccgtagtcgccctgatgcaaacgcaccactttgccttcgatcaaatccaaagcgggaataatcatggtgcctacatctccaaaaagtttttcagcaattgtgcgcctgctgcacccgaacgttccggatgaaactgcacgccaaagaagttgtctttttcaaccgcggcggtaaacggctcgccgtagttggcctgggcgatggtatttggacatattggcatcgcatatccgtggacaaaatagaagtaggtgccatcggcaatgccgcggaacagatgattacctgcctgagcagaaatctgattccaacccatatgcggtagcggtaagccaaaatcggtcatgagttttaccggtgcatcgatgatacccaaggtgtcgataccgccgctttcttcactgtggctagccaaaagctgcatgcccagacaaatccccagaaccggctgagtacaggctttaatcaactcgatcagttctcgctctttgagctgttccatggcggcatgggcggtacctacgccgggcaaaaacagcttatcggctcgtagtgcgatgtccggatcgcggctaatgaccggttcatagcccaaacgttgaacggcgtaggtcacggaggagagattggcgcatccggtgtccagaatgaccacgttcattacagcactcctttcgagcttggcagcgtattgccttcgacgcgaatggcctgacgcagcgtgcggccaaagaccttaaacaaactctcaactcggtggtgatcgttgcgacctttggttttcaggtgcagggtacaggccatggcgtaagacagcgaacggaagaagtgctcaaccatttcggtgcttaaatccccaacgcgctgataattaaattcggctttatattccagatgcgggcggcctgagatatccagtgcgcagcgcgccagacattcgtccatcggtagtacaaaaccgaaacggccaataccacgtttgtcacccagcgcactgttaatggcttcacctagcgctaatgcggtgtcttccacggtgtggtgatcgtcgatataaagatcgccgctaacctgaatatccatacggaatccgccgtgggtggctatctgatccaacatatgatcgaagaaacctacgccagttttgattttgctgccaccttcccgatccagccacacgttcacatcaatggccgtttctttggtcacgcggttaacgtgagcgtggcgatctcgctgagtcaactgtttggctatctgtgaccagttcagaccatcacgttgatagcgcagtccactgatgcccatattttcggccagctgtagatcggtttctctatcgccaatcacatagctattggctccgttcatcacgccgtcggtcaaatagttttctaccagtgccgtcttaggcttgcgacaggcgcagttatctgccgggaggtgcggacaaattaagacgtcttcgaagtggatgccttgggaagtaaaaatctgcatcatcaaactgtgcggcggatcgaaggattcctgagggaaactgtccgttcccagtccatcctgattagtgatcatcaccagtttgtaaccggctttttgcagagccagcagagcaggtatcacttccggttccagcgccagtttatccagccgatcaacctgatagtcttctggcggttcagcaatcagggtgccgtcgcggtcaataaaaagaaatttctggctcataacgttcccttcaaaggctggatgatgatgtattggttgcattggggctatttataccgggtaaagtggctagggctgaaataacccgttcgcattcctgacgagtgccgatagtgatacgcaggcacccagacaatcccggctgtttattctggtctctcaggataataccttgatcccacaagcttttaaacacgctactggaagcagaaaatcgtgccagaacatagttggtttcactggtaaacacctgttctacgcagtcgcaattttgcaattcgccgatgaaccattcgcgagttgttcgtatctcggccactcgctggcgcatggtggcgataccttgcggactcagtgcctgcgctgcgatatccgccaccggagtggaaagcggataaggagcaatcactttaagtagcagctggataatatcgttgttagctagcgtaaagccacagcgtaaaccggctaaagcaaaagctttagatagcgtgcgcaaaatcactaaattcggataatcttttaaccattcgctgacgctagcctgcgggcaaaactcgatataagcctcatctatcgccaccacagcgcggtctttggccaactccagtacctgacgcaagtcctgttgattaatcaggttgccggtgggattgtttgggctacagacataaaggacttttacgccatctagactgtcggcaatcgccggtaagtccaactgccagtcttctttagcgggtacggtacgccgttctacgccaaaggtttctgcgctgaccgaatacatgccataggtcggtgggcaaaataaaatggcatcctgacccggttcgcaaaaggcacgaatcaacagttcgataccttcgtctgcgcctcggctgaccaagacttgatcggccgctatgcctgcataatcggcatagcgttcaatgacttgcttaggctgacattctgggtaacggttaaaggtttgcgccgttaaggtaaagttcggcgcttgcggatattcgttggcgtttagccatacatcgccgttaccgcccagtcggcgcgcagacatataaggagtcagctcgcgcacattggcgcgggccagttcgataatagacgcactcattttgactcctttttaatggcgttaagggcggtaactcgcagggtaacggcatttttatgggccgttaactgttcagcctgcgccagagtttcaatggtcggcgctaaatccagtaaaccttgcggtgttaactgttgcacagtcatgcgttttacgaagtctgccaagcctaaacttgaataagtcgaggtataaccgtaagtcggtaatacgtgattggtgccggaggcgtaatcgccagcggattccggagaccaatcgccaaggaataccgaaccagcgttatcaatcagagcgaccattttttcgggttcacgcgtttgcagaatcaagtgctccggaccgtattggttactgatatcaatacattgctggagatctttggtgacaatcagacgactgctttccagcgcctgacgggcgatagaagaacgagaaagctgagctagctgtttttccacttcaacggcaacggcctgagcaatggcggcatccggagtcagcaaaatcacctgagaatcagggccatgctctgcctgagaaagcaaatctgaagcaacaaaggctggcgtagcgccgctatcggcaatcaccagcacttctgacggacctgcgggcatgtcaatagctgcgccgtcgaggcgttgactaacctgacgtttcgcttccgtgacataggcattgcccggcccgaagattttgtccactttgggtacggattcgctgccaaaagccatggcggcaatagcctgtgcaccgccaagctggaacacttcttcaatgccacaaagctgcgcggcatagagaatttcatcggcaatcggcggcggtgaacatagcactacgcgtttacatccggcgatgcgagctggggttcccaacattaatacggttgaaggcagcggggcagaaccgcctggaatatacaggccgacggaagcgatagggcgcgtgatttgctggcagcgcactcccggctgggtttcgacgtcaaccagcggcgttttttgtgctttatggaaaatttcaatattgcgtaccgcctgcgccattgcctgtttaacatcatccttcagacgtgcggaagcggcggcaatatcggcagcgctgatacgaatatcggctacctgcactttgtcaaaacgctggctgaagtcgcgcagggcgctatcaccctcgcttttcacccgatccaatatctcattcaccgcggcagtaatacgctctgaggcgttgattgccgggcgtgtcagtaacgctttttgctgttctaaactgcattgctgccagtcgatcagagtattgaagttcgtcggctgcatggtttactccatcatcttttcaataggaaggaccaaaatagagctggcgcccagtgcttttagtttctccatggtttcccagaacagggtttcgctactaaccatgtgcatggctacgcggcttttatcaccggccaatggcagaatcgttgggcgttcggcgcctggaagtagggtaatgatttcatccagacgttcgctcggcgcgtgcatcatgatgtatttcgattctcgagcttgaataacgccttgaattcgggtcatcagtcggtcgattagctgctgtttagcttctggcatttcgccatctcgttgaatcaaacaggcttttgaacgataaattacttctacttctcgcagcccgttggcttccaatgttgcaccggtagagactaaatcgcagatggcatcggccagacccgcgcggggagccacttcaacggagccattcagtaaacaggatttaaaacggacgccttgtttatcaaggtattgctttagcaggtgcgggtaagaggtggcaattcggctattttgcaagcattgtgggccgctatattccgcatccagcggggtcgccagagacaggcggcaagtaccaaaatccaggcggcgcagggtaaagtaacgaggatcttccccttgggcgcggcggttaagtaattcttcttccagtacgttttcgccaataatgcccaaatcgactacgccgtccataaccagaccggggatatcgtcatcgcgaacgcgcaggatatcgataggcatgttctctgcgaaggcaatcaggcgctgttgttgcaggttgattttgataccgcagcgtgacagcagttcttgggaatcttcgctcaggcggcctgatttctgcattgcgatacgtaaacgtgttttatctaacatggtaaacctcataacttattcatttaaattcaaaagttttgggcaacaaaaaagccctcggaagatgatcttccgagggctttctttaatgcgttcttacgccacctggaagattcgttaaccgtcttccagcacacatcggcctgtcagactagtcaggatgatggtgatgatggtgattaaattgaacgcgattcataatggtttctcacttggggttatggactcgctgccgataaccagaatttgtaaagtatcgtttgctctgtcaatcaacctaaactatctgatgatgtgaaagcaatctttttttattaagatgattttatttcacgcatgataacccatgtggttcggggctatcctcttattcagatgaatcattgctggcgtggaatttgtaagccgtatatttagcttgttacgccttggtattatcctgatttgagggtaatttggcatgatgaatggaagacgactcggccgtagcccaatggcttaggagcctgagccatgagtttttactgcacaggcaggagagcagattgatgaaaaaggtcgctatcataggtttaggctggttgggaatgccgttggcccagtccttgctgcggcgtggcattcaggtggtagggagcaaaacaacgcctgacggtgtagatgcagcccgcatgagcggtattgagtgttatcagttggttctgacgccggagctgatttgtgatccggaagatttaccacatcttttcgatgctgacgccttggtcgtgaccttgcccgctagccgcaccgcagaggggggcgaaaactattttctggcggtgcagcaggtggttgatagtgctctggtttatggtattccacgcattattttcaccagttccacctcggtttatggagataccgttggaaaagtgaaagaagattcgccgctgaatccggtttcggtggcggggaaaacgctggtggaattagagcaatggctgcatcgattgccccatacttctgttgatattcttcggcttgccggattggtgggcaatgaacgtcatccggggcgtttcctggcgggaaaaacgggcgtaaaaggcggttcgcaaggagtgaatctggttcatcaggatgacgtgatcgctgccattgaactgctgctgaagttacccaaaggcggacatacttacaatttatgtgcgcctaagcatccggccaaaaaagatttttaccctgagtttgcccgaacattgcaactcgcaccaccggagtttgctgctgaagaggaagagcagcccagccgtctggttgacggtagccggatatgcagcgaactggggtttgagtacacttatccggatccagaaagaatgccggtaagctagtcgttagtgtgaaacggtgtggggatcggatttcggtttgcagtcgtttggttaatcttgaactggatgatatcaaccgaaatctgatccttttgacagagtaaaattcagcttaatccaatctcgatcacttgcttaaacgccggacgctggctgatttgctgataccaacgtgccagatgcggatggtggctgcgttcgatcggtaaattgaaccaggcataagcgatgcaacccagaggaatgtctccgacaccaaagtgttggccagataaataaggctgtttttccaattcgccgtttgcaatccccatcagagcatcccattcttttatgccctgctgaatcttctgtttatcctgctgttccggcggagttcgtaccaaaccaacaaatgcagctttgaacggagcggctaaagcctgagcccaatccatccatttttctgcgctggcacgctgttggatgtctgctaggtaaagtgtgctcttttcgccgtatttcaatgcaatatagcggacgatcgtgttagattcccacaaaataaagtcgccgtcttgcaggcagggaatcagcccgttagggtttagtgaacggtaatttgggtcgtccagcttgccaaatttgccgccggcatcaatttgctgatattcaatgcccaattcttccagacaccacaatactttttttacgttggtggaattgtttctaccccatactgtcaacattgattcctcacttattgacctgaatgattcggtataatcgaagtgttatcgtcactataagccggtttcatagcctaaagaagtatgattgtgtatcaaatactcaccgtgccaatgagcgatattccattcgttgagaatggcgagatctgccaattggttattgggattgataaccgtcgcgtaatctacaaactccaacattggcctatcgtttattgagtcgctgtagccataagtattggaaaaacagagaggtggcgagtttttcagccactcattgatgcgcgcaaccttaccttcgcgaaaagtgagtacgccgtaggtatctccggtaatccggttatcttccagcgcgacaccaatggccaacgcagtatcggcgcctaattggcgagcaataggtgcgactaaatgctcgccgctggccgagataatcagaatatgatctccccgctgtcgatgccaatccaactgctcctgcgcctgcggatatactcgcggcaaaatttcctgctgaataaaactttcaacccaacctgtcacttcttgtatggaatagccgactagcggagccagcgtggcgtgcatgtaacattccatggaaagctgaccgcgataataatcctgcatcaattcctgttctttttttagcaaagacagcggagcccgttttttcgccactaaccagcgcaaccacaggctggcactgtcttcacaaatcaaggtttcatctaaatcaaataaggccaggtccatggactacctctcaatgcaattatgactgttaaagcgtggcactgtcggggggatgagcctgggccaggaacaaccacagtgacaaagccattaaccgtaaagtaatccggtgaatgaatactgagtagcgcattgaatacaccacctaagagtaaacgaaaccgctgtttcctatggcttaggtaatgggttacggcaaaagatttgctgtcttcaatctgtccttcggcggaaaaagagacaaagaataagtcaaaaatgtgaccgtttaatggcgaaaagcggcatttcgaaggattttcacggatattctttactctttccgcgcacatcattcgccgtgaaagaaataacatagaacctaaagatattggtggcgggcagattttgcgtgttaattgtatatatcgtttggatatagattgttaagtagatagacgagaatgctcttaatgagaggcgatttttactccacaagaaccttgtcgtcagtctgttttccccacagcttaggagcagattatgtttgttattcgtttgtattgttgtccggtattcatgggttctgagcaggataaaacgcggaataatcatactatcggagtaaaaaatgagtcgccaaccaacctcttaccgtctacctcttctggatctgtctcagcttaagcgcggagaaacgcagcgccaggcatttttgaccgaattacgccatgctgcgcgagatattggctttttctacctgaccggacacggagtcgatcccgagctgtcacggcaaattcagaacctttcccgacgtttctttaacttacccaccgccgataaactggcggtggagatggtgcattcccctcattttcgcggatataaccgagccgcttcggagctgacccgcgggcaaccagactggcgcgaacagtttgatatcggcgcggagcgttcacctttggaactgcgtccggaaacgcccggttgggcgcgtttacaggggccaaatcagtggccgccagctttgccggaattgaagcctctattgctacaatggcaagcagagatgactcaaatggcgctgcatttgctacaggcttttgcgctggcgttggaactggacgaacacgcttttgatgagctttatggcgataaacctaatgagcatatcaaactgattcgctatccggggcgggaaactacccaaagcgggcagggggtgggcgctcataaggattcaggcttcctgagtttcttgctacaggatcaccaaaaggggttgcaggttgaggtggaagacggcttatggattgatgccgagccgttggaaaacacttttgttgtcaacatcggtgagttgctggagctggcgaccaacggttatctgcgcgccactgtgcatcgggttgaaacgccgccggcgggtgtcgatcgtctgtctattgcctttttccttggggcgcgtctggatgcagtggtgcccttgtatcagttgcccgaacatttggcggctgaggccaacggtcccgctagcgatccgctcaacccgctatttcgggacgtcggcgttaactatttgaaagggcgcttacgttcccatcctgatgtagctcaacgctactacccggatgtgttagccgctgccgaactaacgatagcttaaccctattgctgataaccgaataaattgcctgaggtaataacgatgaataatacgtttgcaatgggtttcgcgcgtaccgcgctgatcacgacgctggcattttccctttctgctcaagcttatgcggcaaatgccttacgggtggctgccgatccggtgcctcacgccgagattttacagtttgtgcagacattggatccgtcgctgaatctgaaggtgattgaaattccgaacggtgtgaattctaacgaactgttggcacatggcgatgtggatgccaattatttccagcatgcgccttatctccattcacaggaacaggcgctagggcaaaaatttgccatcgtcgcgacggttcacgtggagccgctgggtatttattcccataagtataaaactttcgccgacgtaccggaaaagggcacgatcgccgtacccaataatgttactaacctgagtcgcgctctatatttattacaagatcagggtcttatcacgctaaaagcaggatttaccgatccggctaaacatcaggctacgccgaaggatattgccggtaatcccaagcaattgaaggtgctggaaatagaatcgccgcagattcctcgttcgctggacgatgttgatttggcagtcattaacggaaattacgcgttagaggcggggttaaatccagcgaaagatgcgcttgggctggaaaaagccgctggcaatccttatgccaatattctggtgacgacgcctgccttagaaaatgatcaacgtatcagacagttagttagagatttacagtcgccgcaggtggctaagttcatcgccgaaaagtatgccggatcagtcatccctgtggtcgccgtggacagtaaatcatgatcgccatcgaacggctgagtaaaacctatcagcatgctgggcagccgatggttgccctacaggatatttcgctgacggtgcctaccggttcggtgttcggcatagtggggcgcagcggcgcggggaaaagtaccttaatccgttgcttaaatttgttggagcggcccagttcaggccgtattcagcttgatggccacgaattgaccactcttggtgataaagcgctgcgcgtcgagcgtcagaatattggtatgatttttcaaaatttccatctgctgcactcgcgcaatgtcagcgacaacgtagcggtgccgctggaaattatcggcataggaaaaaccgagcgaaaacggcgagttaccgagctgttggcgttggtcggattattggataaagccgaggcttttccctcccagctttccggcgggcaaaaacagcgggtaggtatcgctagggcgttggcggccaaaccgaattatctgctgtctgacgaagcgaccagcgcgcttgatccggaaactaccgcttctattctggcgttgcttagaaacattaatcagcaattaggtttaaccatagtgctgattacccatgaactggaagtggtgaaatccatctgtcattacgcggcattgatggagaaaggccgagtgattgaaaccggcgctattgcagatttgctggctgatcctgcatcacgccttggaaaatcactgttgccgacctgcggcagcgagctgttgagcggtacgccggtagcggaattgaccttcttcgatacgttattggcttcgccggtgttaagcgcattggcgcatcagcatgcggttggcgtcagattgctgggcggcggcgtagaatctattggcggtcaacgggttgggcgtttgcaggtggattttagtcatccggaaggcgggttaaatctggctgaagtgctgcaatttctaaacgaacgcggcgtgagggcggaattgatatgagtaacggtatggattggcaggaattagtggatttgatcacaaatgccaccggtgagactttgtatatggtgatattggccacgttcttcaccttagtaatcggtttacctttgggtattctgctgtttatatcccgtaaagacggcgtttttcccctatcgcgtatcaatgctttgattggcgcaatcgtgaatctggggcgttccatgccgtttgtggtgctgttgatcgcgttgattccggttacccgctggatcatcggcaccacgctaggcagtacggcggcagtggtgcctattactttaggtgccattcctttttttgcccgcgtagtcgaagcggcattggacgaagtggataaagggcgtatcgaagcgattttatctatgggcggttcggcgtggcacgtcatccagaaggttttactgccggaggctctaccggcgctgttagctggggtgacgttaacggtagtgatgctggtgggattttcttccatggcaggcgtgataggcggcggcggactgggcgatttagccattcgctatggttatcagcgatttaataatgaagtgatggttgccaccttagtggtactggtgattttggttcagggagtacaaagtctgggcgatcgctgggtgaggtctttagcgcatcgacgctaatataacgcgttttaaccactcaaacccataccagcccgcaggccacgcgggctgttgtatttctcttatgctgacaccgcggcgttttatttccaaaatggtcgattatagtcacgcttaatatcactgcggctcataccaatatcccgtagctgggtttcagtgagtctttgcagcgtatgcattgccagccgccgttggttccaatcatacaaagcattccctatttttaggctgaaacgcagtaaaacatttcgccgattttctttatcctgtgattggggtgaatggcatttatccatctgattattaaccatattgctcatagctcgtgactccttatcggtggaatatcagcatgaggctttggctaaaaacattacagatgcaaatagggactattatttccatacagatgtgagataaatgaactgaatggtgagaaattgcgccatctgtactggttatcaattttcaggtggtgctatttgtgacacgttatcaacaattggctgatattctcagcgagcgtattgaacagggtttgtattcttgtggtgaacgtttaccttccgtcagactgctaagcgaggagcacggcgttagcatcagtacggtccagcaggcttatcgttctttggaaaagtgtctattgatagaggccagagccaaatctggctattttgtgcgcgggaatccacgccgtccggaactgcctgcggtttgccgccatgctcagaggccggtagaaatctcgcagtgggaacacacgctggcatttctccatgacagtaccgaagaagacgtattgcatttaggctcaggtacgcccgatagttcaggccccggcttaaaggtgctcagtcggttgcttagccgcatcagtttgcaccaaagtgaagccatcatggcttatggcagtttgcagggaagcctgattttgcgcgagcaaattgcccgcctgatgctggatagcggcaatcaccagtcagcggaaaatattattattaccgccggttgccacggtgctttagcgattgccttgggggcggtatgtcagcctggggatatagtcgccgttgattcacccagctttcatggcgccatgcaaagtctgaaaggcatggggatgaaagtgattgaaatcccaacggatccggtgatcggcattagtctggaagcgttggaaatggcgctggaacagtggccgatcaaagccgttcagcttacccccacctgcaataatccgttgggttacaatatgccggatgggcgtaaaaaagccttactcactttggctcagcgttacgatatcgccattattgaagacgatgtttacggttcgctggcctaccaatatccgcgaccggcgactattgcctcgtttgacgacgatggacgagtgttactgtgcagctcattttccaagacgttggctccggggctgcgcgttggctggattgcgccggggcgctatttagaaaaagcgttacatattaaatacattactgctggtcgaacccctacgttacagcaattggcggtagcggagtttattcgacagggagatttcactcagcacctgcgacggatgcgccgtcagtatcagcaaaatctcgatattatgacccattgggtgaccaaatattttccgcccagcacttgtctgagtcggccgcagggcggttttatgctgtgggtagaactgccggaagggtttgactctttgcgccttaaccgcattttattgcctcacaaagtgcagatcgccgccggttttatcagctcggcgtcggggaaataccgtaattctctgaggctatgttttagcaaaccgatgacggacgaaattgagcaagcggttaaattggtaggaaaaacggtcagtgaaatactggcggaaggttaaaaaaccgattgataaacggcccgatagcaggccgttggtgactgagatctattctggctgggattaacccgccaatgcctgcgctaaatcggcgatcaggtcttcggtatcttcaattccgacggaaagacgtaataactgcggcgtaatgccgtgtttaaggcgaatatccaagggtatcgaagcgtgggtcatgctgtaaggaaggctgattaggctttcaacaccgcccaaactttccgctaacgtaaacagatgagaacgtttaatcacttcgcgggcatactcgggttcgcctttcagccgcacggcgatcatgccgccaaaaccggacatttgctgacgcgccaactgatgctgaggatgacttttcaaccccggataatacaccgcttccacctgcggttgctgttccagccactgagcgatatgcaacgcgctttcattgtggcgtgccatacgcaacgctagagtccgcaggccgcgcagcgtcaggaaactgctgaacggatcgagaatcccgcctaccgcattgtgtaaaaaaccgagttgttccgctaattctgagttatttcctaccgcagcgacaccggctaccacgtccgaatggccgttcagatatttagtggctgaatgcaccacaatatcaaaacccaaatccagcgggcgttggatgtaaggcgaggcaaaggtgttatccgccacgctgattaattgatgttttttagcaattgcggcgatggcggccaaatcagccagttttagtaacggattggtgggcgtttctacccaaatcattttagtatctggttgaatcgcctgttccagcgcggtggtatccgctggtgaaacgtaggttacgcgcaggccagcggtgcgattgcgcactttttccagcaggcgataagtgccgccgtacagatcgtccacggcgacaatatggctgccctgatccaataactctaacaccgtcgaacaagccgccagaccggaggcaaaagcgtagcctcgcgtgccgttttccagctcagcaatggccttttccaacgcgctacgggtcggattgccgctgcgggaatattcgtagccggtatgctctcccggtgcgggttgagcgaaagtggaggtcgcgtaaatcgcgggcatcactgcgccagtgctgtctggggtataaccggcgtgtacagtcagggtgtcaaactttgccataataaggtccttgaaatataaattaagccagtgcctggcggcgggcatttagcacatcggtgcgggtaatcaggccgagaagacgctccccgtccagcacgatagccacatgtccctgatcgaatgtggtgagcaagtcggtgtaactcgcttctttctgtaaggtctttacctgccgcgtcattgcttcgctgaccgctaaattgaaatggcgggcatctttttgcacgctattaagcaaatcccattcgtcaatcaaaccgacgacgcgttcgttttccagtaccggtagttgggaaatatcgtaaagacgcatacgagcatgaactaccgccagcgaatcttgcggtgaaaccgaaacggtagcgccgtcctcgtggctataggtgatgtaatcgcgcagatcgccgtgcttcgggcgagtcagtaaaccctgttccagcagccagtaatcgttaaacattttcgaaagatatttattgccactatcgcaaacgaaggtgacgacgcgtttcggctcggtttgttcctgacaatagcgcagggcagccgctagcagagttccggtggaggaaccggccagcacgccttcttcttgcaacagacggcgggcggtggcaaaggcttccgcatcatcgatttggtaggatttcgtaacctgcgagaaattgctaagggggggaataaaatcttcaccaatgccttccaccagccagctaccggcttctccgatccgatctttcgcgacgtaatccgccaaaatagagcctaacggatcggccagaacaaattgagtattgggggccacttcggcgaaatactggcttaaaccgctaagcgttccgctggaaccaacgccaaccacgatggcatctacctgaccttccatttgttcgaataattctgggccggtggcgttacggtgagccgcagggttggccggattattaaactgatctatataaaacgcgccgggtatttcctgtgacagtcgtagcgcgtaatcctgataataggccggatggcctttacccacgtcggaacgagtcaacagcacctgcgcgcccaatgctcgaagatggaagattttttcctggctcatcttgtccggcactaccagaatcagtttgtacccttttaatgccgcgactaacgctaatcccaaaccggtattacccgcggtggcttcgataatggtaccgcccggctgtaaatcaccgtcacgctctgcctgttcaatcattgatagcgccacgcgatctttaatcgagccaccggggttctggttttccagtttcacaaacagctgacaaggaccagtatcaaagtgcgtgagttccagcaggggagtgtgtccaataagatcgatgactgaacgcgggattgccataactgctccagaagccaaaagaacgggtaaacgatggcgagagcatagcgcctgttacttagtcgctaaaaataacaaataaccctcttatatttcttttggttatataaagtgaggttttaagacgtttgggtgcttagatggaaagccgtacagctatcaagatgtttagccgtgtagccattgaaaacatgaccaagcgtaaataagcgcaaaacatcacccctttgtggtcgttatcggatagatttaaagagggtatgaaattttgactaagctaaagtctctaccctagtgaaaaaacgcgatttttttacgtattgaataacggcttagttctgggaataccgcttatttcctattatttgcaaggatactctggcgacctcatgatgaaatatacaatctcctccaagctaaaaaacgtcactttcagtgccggtttactgttgctggcgttacctgccgtcagagcggcagatgagcaaccggctcctcccattgatgctaaagcttacgtattgatggattacaacagcggcaaaatattggctcagaacaatccggaccagcgtctggatccggccagcctgactaaaatcatgtccagctacgtgattgggcaagcgattaaagcgggcaaagtccatcctgatgatacggttaccgtgggtaaagacgcttgggctaccggtaatccggcattgcgcggttcgtcgttaatgtttttaaaaccgggcgatcaggtcaaattgatggatctgaataaaggcattgttattcaatcaggtaacgatgccagtattgcactggctgattatattgctggcagtcaggacagttttgttggtttgatgaataactacgccaaagctctggggctggataatactcacttcctgacggtacacggcctggatgcggaagggcagtacagtaccgcgcgggatatggcggtattggggcaggcgctgattcgcgacgtaccggaagaatatgcgttacataaagagaaagagtttacctttaacaagattcgtcagatcaaccgtaatcgtctgttgtggaacagcaatcttaacgtcgatggtatgaaaaccggttataccgcaggcgctggccataatctggttgcttcggctaccgatggtcctatgcgtttgatttccgtggtattaggtgctccaagtgacagagtacgttttagcgaaagtgaaaaactgttgagctggggcttccgcttttacgaaaccgtggtgccgattaaaaccgacaaagccttcgtgactcagaaagtctggtttggcgataccggtcaggttgatttgggcgtagcgcaggatgcggctatcaccattccgaaagggcaaatgaaaaacctgaaggccagctataaattagattctaccgagcttcgtgcgcctttggctaaaaatcagaaggttggcgtgatcgatttccagctaaatggtaaaagcatcgaacagcgtccgctggtggtgatgaacgaagtgaaagaagggggcttccttagccgcatctgggactttgtgatgatgaaatttagccaatggttcggcggtatctttggataatcgcgacctaggttaaattcagcgataaaaaaacagggccgcaataaataaatgcagccctgttttattttcagtactaaagcgactatcactataaaactgattcagtataaaaccggttagaagcagaaaaaccgatcagtcgcagggaacgattttaatcgccagcccgccgcgagaagtttcgcgatacttggcgttcatgtccttcccggtttcgtacatggtttcaatgactttatccaggcatacgctaggctcgctggtacggcgcagagccatacgagcagcgttgacggcttgtaccgctgaaatagcgttacgttcgatacaaggcacctgaacctgcccggcaaccggatcgcaggtcagcccaaggttatgctccatcgcaatttctgcggcgatacacacctgcgccgggctaccgcccatcagttcagccaaacccgctgctgccatcgaacaggctacgcccacctcgccctgacagcccacttctgcgccagaaatagaggcgttcattttatatagcgcaccaataacgccggaaaccaagaagaaacggctatatgagttttcgttaaccggacgaataaacttatcgtaatacgccaataccgccggaatgataccgcaggcaccgttagttggtgcggtaacgacacgcccaccggccgcattttcttcgttcaccgccagcgcatacatgttaatccagtccactaccatcatcggatcggtgttatttttgtcgttggtcaccagcatacggcgcagggctgcggcgcggcgtggaattcgcattggcccaggtaacaaaccttcggtattgataccacgctcgataccgcttttcatcacttcccaaatggcggaaaagtgcgcgtttagctcttctttggtatgcaatgccagttcattttgcagcactaatccagacagagacagaccggtttctttacagtgtttctgtaaatcacgggctgaattgaatggataaggtacagaaacttgattgctggctgctttgccaaaattctcttcgtcaacgataaagccgccgccgatggagtaataggttttgctgtacagcagtttgtcaccggcaaaggcactgatggacataccattttcgtgcagtggcaagttggtttcgtggaaattcattcccccatgtagcgggaaatccacctcatgagcgccctgagccagtagcagacgctcacggtgttcaacatcacggataaactccggaatgctatcgatatcaacggtatccggcagattccctgccaggcccataataatagcaatatcggtatggtgacctttaccggtcagggataatgaaccgtaaacgtctacggaaattcgggtaacggcagaaagatgccctagtgcgatcaagtcatcggtaaacagcttaccagccttcatcgggccgactgtgtgtgagctggaaggaccaataccaatcttaaaaatgtcaaaaacgctgaccatatactcgcctccttcgtgttaaaggcgttaattatgaaattgcttacattaccgtggagtggggagccggtacgatcgcaccggcttttgaaactttaagtctactgctaactgttttaccgtcctaaagatgaacggtagcgaaaagtggccagcgcagcgcaccggccgaacagtcttatttgaacaggctgaacagaattgctgagatggcaatcagacccataatcacaacgaatacgttgctgatatggccactgtatttgcgcatcgctggaactttgtgaatcgcatacattggcatcaggaacagaatcatcgcgataaccgggccacccagagtttcgatcatgcccagaatgcttgggttcagggttgcaacgatccaggttgtgaccagcatgaacagcgcagtgatgcggttcagtttgtcgccgttaatggttttaccgcggctacgcagagatttaaccaccatgccgttgaaaccttcacgagcacccagatagtggcccaggaaagatttggtaatagcaataaaggcaataaccggtgccatgtaggcaatcatcggggtattaaagtggttagccaggtaagacagaatagaaatgttctgtgctttggcttccatcaaatctgctggagacaggctcagaacgcagctgaatacgaagaacatcacggtcaaaaccatcatgatgtggctgtatgccagaatgcgagaacatttcttctcagcgtcctgaccgtattcttcacgttttgctaccgcaaatgcagagatgataggggaatggttaaaggagaacaccatgaccggaataaccagccacagggtcatcagcataccgttgcccacaccgttaccgtcgatagacaggttttggaagatagcgctgctccagtttggaatcaggtacagagccaacagcatcagtaccgcaacaaacgggaataccagaatactcatcgcttttacgatgaagttttcaccaaaacgaacgatggtcatcagaccaacgatcaaaatcagggacaaaatagcccgtggtggtgaaggcaggtgcatctggtgagtaataaagctatcaacagtgttggtaatcgcaacgctataaaccaacaaaattgggtagatagcgaagaagtacagcagagtaatcagtttacctgcgccaacgccgaagtgttcttcaacaacttcagtgatgtcttcgcccgggtttttgccggaaagaacgaagcggcaaagaccgcggtgcgcgaaaaatgtcatcgggaaggcgatgatagccatcacgattaacggcagtaaaccaccgataccggcgttgataggcaggaaaagcacgcccgcgccaattgccgtaccgtacagacccagcatccacatggtgtcgcttttacgccaggtgctggttttggtgtttcccgtggatgaaatggtgccagtttgagtagtgtccataaagatctccgatttgaacacgaaattgaaattaagatccgaaagttaaatacctgttagtgcgttataagtcgcataatcagatgaaaaattcagtcacagtaatgcgttttaaatcttatcaggtcgatttggttctctttaagtagtgcaaataacctgaagtcgtaaaaataaaatttaatccgcggcgagcagtgatgtctctctatgctgatatttttatggttctaattcgtaccctggtttttgctggcggcaagataacgattcatagtgaaaagtaccgtgatcatgctctcaaatgctgaataaacgcctttaaacccagttgttatgaatttccatctaattgttacaattatgttcagtgttttgtactgcacctgcttgataaatgataaatgataaaaagcaaaactgtatttcaatttagattgagtcagcgacttaacctttgctctttatatcttgaggcgcaatatattttaaccagcgcgtcgaatctagcggaaatcgaaattttcagtattttattgacgaaagtcataatgtcaaaacaacagaaattacataacttattgattttaaatttaaattagtgtttatttccgttgggggataatgtgttgatattaatcagtatcacgcagcgctgtttgttatataaacagttaaatatctgagtaaaaggaaagagttaaattctatttgtttgacaagtttgctttaaatactgacttaaggtttatttgtcatatgaaagtgaggcaagttacttttgtctgacaatataaaaggcgagttttagtgcttaaaggtgtctggcagtaataaatgttaaaataatttacttttcaaaccgactgttcgaacatttaataaacaaccattaaaagtgaagtgcgttttttataggcaggaagtcattaaccataatataaaaaaggttatttaattatgccgtcaatcgggtgaaaatttaatccctaactgaaaagtaaagtacgtgatgatatttataatttgctattttggcagaatgaggaacggataaagtcagttaatcaaactcagttctaccgtcggatagaaaagggggaattcattcgctaaacggtactttcggctcaaagatcgccaaacatcgaacatgagagccgcgtttgctaactattgtcgtttaactgtggatttctatgctggtttcgttaaagaacgaacggaaggagccatcaggctggcggtcggtgaccagagtatcaaatagcgtcagtggcccaatactggcaggtttgatttggccgaatttactgtgatcggctaccagaatcttgcgctgagatttgttcagtgcgcgctgtttccacggaatttcgtcgaagttaaaacaggttgcgccgaattcaatgctcactccggcggcagagataaaggctttgttcgggcaaacgttatccagctcgttatgctggccgatgggtgagaaaatatagttgtttggcttgaattcgccgccgcacaagatcactttgcagttcggtttatcttgaagcgaaagaaaggtattcagcgaataacagagggcagtgaaggtcaactcttcgggaatttcgtcgataattagtgggatagtggtgccgcaatcaaagaaaattgtgtcgttttcttcaatgagctgcgcggccagttgcccaattttgcgcttttcctctacctgttttgcctgctgatcggaaacaaaatagttgttagcgctgttcgacttgggatccatcaccacataaccgcccagtagaatcacggcagaaggttccgcactaagatcccgacggattgtcatttctgaaactcggagcaaactggccgcgtctttcaaatgaattttgtcggaacgttttaaagcgtgagtcagtttattaatacgttcggcacggcgagtttccattaacgcttcccaacaaagtaaacccggcctaagccgggttaaagataattagtagctggacgcagccgcttgctggccagatacgatggctacacctgaacttgtaccaattcgcgttgcgccggccagaatcattttctcggcagttgcgcggtcacgcacggcacctgaagctttaacacccatatccgagcctaccgcagcacgcatcaatttcacatgttcttcacgggcgccgccggtgctgaaacctgtagatgttttcacaaaagcaacgtcaagttcacggcacatttcgcaaacttcaacgatttgctcattgctgagcaggcaggtttccaatattaccttcaacggaatagcggcgcaaatatcgcgtacggctttaatatctgctttaacttcagcgactttaccgctttttaaccaacctacattaatcaccatatcaatttcttgtgcgcctgcttcgatagccgccttggcttcaaatactttgctggaagtcagacctgcgcccagagggaagccaatcaccgagcaaactttcacatcgctgcccgcaagctggctggctgccacaggaacatagccggagtttacgcaaacggcgtagaaatggtgttgtttggcttcttcacacagtttgacgatctgcgcttcggtggcgtccatggctaatagggtgtgatcgatataattagcatagttgatagtcataaaaaatgtccttggtttgtgtaggtaatatcatttgttgtgataatagtaacatttaacgcaaatgacaacctttatgttgttaatatcacatgtaaaagccatattttgttatttaaataacatttagtgatggtgttagttcttgctatgaaagagataggagatataaccggctgatttatgatgagttatcttgagagacagagattcttgcgagcaaaccggcagaggttctgccggtaaaatgcgaacagttggcagaaattaatcttttacccaacctttactgataggaaaagagaagcagcgttgataaagattcgccaatcctttcgcgatgttatcgccaaacagattccacagtaactgtgaaaataagcagccgacgattgccaccaagaagccaccgaccatatctaacggccagtgtacaccaaggtagatccgcgaccaggctatggccaacccgacgatcagcaaggcaatgccggaccaaatccgatgccagcataaaaaggccagcgcaaaggtaaagatggcggtgccatggtcgctggggaaggagctgtccggtgcgtggggtaaaaagttatagccgaaaccatcgacaaaggggcgattatgcgggaataacataccgatacagaccgatgaaagcattgcaaaaatcagcgcaatggcggttttactgatggtctgacgctgtagcgacatttgttctcgcgggccccacagccataggccgatcatcagtaatggaatgatgctgatcagatctctggcaataaaaatggcgaacttcaccaaccactcgggtgaattgggcgtggcgttaatcagagaaaacaaaaaatgatttaattgttccattactcagtaccttaatgacggtggtcataaccactaatcaaccaaaaaagagccaattggctaagccagacccaccacccagcccacaggttatgagtcagaaaatgtgccccgcgcatgacctgaccgaatcccattatcattcccaaacatacgccgactatccagcaaagcgtagcaaggcgagggcgttcaggataaaacaggaagaatacggccatcagcgcaaaaccgctggaggcatgtcctccggggaaacagtgaccggggcctgcgccagccggagctgtatccattaatatgtagctggcggcttttccaccgtattccaccagatcccaaggacaggaatgagcgctggtagatttcaatatcccaataaccaaagggccaacgccgatcagcatcgtggtcaccaccagtcgaaaatttcggcgatagactccccaaaatagcgagcagacggccgcgctgataatcgtgatttttaacagccggtgattgaacaaatctaaccagtagttatgttcccaagggaaactctgggtttttggatcaaaccaatagccacttatcagcaagtcgagttgttcattacgagataaccacagaaacaccaatccgctgattgttaacccaaaaacctgccaaaggtaaaaggataacggcaatgagtaaagggggtttgtcctaattatcactcccgttgagccttgatttaatgatgatggagtgttttcactgttcttcacggttaatccagcaggatattcataatagtcccactgtaataattctatattaagaaagccttagggcgcttctgacgcagataggagccgttttagaaaagggaatcagcgtgttagtaacgctaaggattagggcgagagaaatgagcgtgcagccaagggaaaagggctgattactttgaaaaccgggcaaattaacaggataataaacgctgaaaaacgactaagaagaagatgtgatgagtcgattaaacaaaactttcgttcctttgtacgctatcggtattgccttattgagcgccagtgctgctgcggagcgagttagcataacgaaacctttcgtgtgccctgatatttcacccttgccacagcatgtaacaagtgaaggtaatctggtgatcgatgggcaaacctattatctttggaatcctaacgcagctgcggcttcagcgcctttgaccaataccatctggtcatctgctgacggcaagaccgaagttgatattatgcagtatcgagacggacgttttcagcaggcatttatttcgttctctaccaacattcggaaactgccgtttggtgaagatccagagagatatatcaacggagagagagattcctacatggacggtggacagggttgccataactgatcgtcagtcattcagccgaatcgcagccgccgcacggcggtttttttgtgcctgagcagaggtgtttagctacgctgccgccaatttgccgccattaagctgaatcagtatttaatcttgttgtttatagggttactttatttcaggcaagaaaaaacccgattagtcttgaacctaagaaggcgggactatcgggctcctcaatatggggacatcaaagaaaagcagtggcactaattcagactacggctaaaccattaagttcttgccgaatgcgaaaaatataaaatttattgtaccttcaccgaaaatagatcggcgctatccccaaattcccggccagataatcacaatcagcgaaccggccagggtcagtaatacgttagcaatggcgtaagtgcccgcgtaacccaacgctggaatgttactgcgggccgtgtcgctgataatgtccatcgcaggggcgcaggttctggcacccataattgctccgaataatagtgcgcggttcattcgtaaaatataggcaccgaacaggaagcagataatgactggcaccagactgactatcaggccggatatcagcatttgcccacccacggcacccagactgctattaataccgccaccggcgctcagaccaacgccagccataaacaccatcagcccaaactctttcaccatattgagcgcaccctgcgggatatagccgaaagtcgggtggttggctcgcaggaagcccagcatgatgccggccatcagcaagcctgctgcgttaccgataccgaaactgaaattactgaattggaaggtaatcagaccaatcatcaggccaataataaagaaggcacagaaagccagcagatcggtgacctgactatgaatggaaataaaaccgattttttccgcaacgcttttgacccgacgggcatcgccgctgacctgcaagacatcgcctttattcaatacgatgctgtcatctataggcatttcaatctggctgcgaataacacggttaaggaaacagccgtgatcggtcagtttcaaatgactcaggcgtttacctaccgcattactgtttttgaccacgatttcttcggtaacaatacgcatatccagaaggtcgcggtcgaaaacttctttaccgttacggaaactgggatcgaggcgcgaatgagcatccgggtagccaactagcgatatttcatcgccaacctgtaacaccgcatcgccgtccggattagccagaatgccgttgcggcgaatacgttcgatgtaacagccggtctgacgatagattcccagctcgcgtaaatttttgccgtcggcccaggctaccagttccgggccgacgcggtaagcgcggatcacgggcaaatacactttacgctggctatcggtatccagaccgcgctcacgggcaatttgctgggcgctggtcggcaaatcctggtgttgcagttttggcagataacgcgcgccaaaaatcaggctaaccaaaccgatcaggtaagttagggcatagccgaggctcaggttatcctgtgcgtgttgcaacgtcgggttattggcaatggtatggcgtagggtgtctccggcaccgaccagcactggcgtcgaggtcatagatccggcgagcataccggcggtgaggccaatgtcccaaccgaacagtttacccaacccaagcgccagaaccatggcgcttccgaccattaccagcgccagcatcaggtagtttttgccatcacggaagaatatagagaagaaatttgggcccgcttcgacgccgacacaaaaaataaatagcataaacccgaggttcagggcttcggtattgatagcgaaatgctgttgtcccaatagtagagaaacaaccaatacgccgatagagttacctaactggaccgagcccagccgtaatttaccgaggcacaaccccagcgcgagaactacgaataacagcagaatgtagttgccgtttaacagatttgcgacgtttatattcacggaggataacttattgtttaacctgaagtagataacgctaaaaagggttatgtgacccggtaatatctgcattcgttgccagataaatgccttcagcaaaatctgatgcatgtaacggcaatggcggtggttattctagtctgtccgagggattacagccagtagtaagcggggaaatcggtgttagcggataaatatgcttttaacggggaaattaatagcgggatcggccaaaaaatcaggccttatctgtgggattttcgtgattttattttgaagtttcatgagagcgttcaagccaaaatacagagagggtgccgaagctccctctctttatcgcacctaagccatcaattaatggcttaggtatcgctattatttgaacagattcagatgttctttagcgtaagcttcaaaatcagtgaaaccaccgatgtgtttttcatcgataaagatttgcggtacggtttcaaccggcttaccgacagttttttctaaatcggctttggtgatattttccgcatgaatgtcgatatagttgaaatcaaaatcgtcacgctcagctttcagtttttcggccagctctttggcacggacgcagtaagggcaaccaggacgtccgaaaattacagtaaacatgcaaaactccttgattatattgagttaatcacttcgtctgccaatcagtgtatcttcgattgctgaatgacttgtcgcgtattactcactttcattgggtgttactatgcccgttgatgagacgaaaacaaagtaggaattgcctgttaatccgattatccgaacctatttatatccgtcgattctttggcttaaccgattatttacattcattgagtgttgtagcattggcggattcaacacctttggctaaatcttataagtagttgtacaggaggaaaagatgcgtgctttaggcgatatgcccaaaatggtgattattttggaagccttgggaatgttattactggtgctggcctatttaagtatcaatcattatgtcacgctgcccgctggattaagcgagcctatcgtcgcgattatgatgatatttattggtattgggctaatggttccagccgcagcctgcatagtctggcgtgtggcgcagggttttggcccgctattgggaatgaatgggatcgataaaaaagacaccgccaaaacggcagataaagaggagaaaaagccttaatccctgataacgataatgacaaagacttctttttcctgttgtttgcgtatctcttcgcatatttcgcagatagtcacggcttttgctgtcaattagtctggattggtcatggcgctaacggcgaatattccgtaagctatgccacttttcttgttgcaagaatcgtgaggtaggttgctatggattcactcatcgtcccggatttagccttattacggcgttggctggatcagttagggatctcgttctttgaatgcgactcatgccaggcactgcatttgccccacatgcaaaattttgaaggcatatttgatgccaaagtggacctggtagataacgttattctcttctctgcgttagctgaaatccggcctacggcgctgattccgcttgttgcggatttaagccaaatcaatgccagctcgttaacggccaaggcctttattgatattcaggatgataatctgccgaagttgattgtttgccagtcggtgtacatcacccaaggtattacgctggagcagtttggccactttatgcagcagagcgaagagcaggtttcgatgattattctggaagcccgagcaaacgatctgctgttcatcggtgaaaccgaagaggaagaagggcaggtcgtgccgacctctttcccggttattcactgatttagctggccgccatccccggcggcatgctgtttttcatttttcccgccataagatcctctgctttttaccctagtttgccagatatttagcgccgtttatgccacaagtggcgaattacatagattaactatgcataaaaagtcgataaaaggcgttttttacgctggatactggctcgtataactatcaggggttatgctttatgctctgcaaagggcatatgattacccccgcaaattcgtggttattgacgcttaatcaataactcactccagtgcatagccatgcataacgagtttgtggcaatagcgctcgatcaggaaaggtgttgtacccgtcgggtacaaattcaattctatgatttaccctgttctggaggagttcacggatgttcacccaacgtaaaaaatggttatcgggtgttactgcaggcctgcttatggccgcgtccgtctcagtttctgctgaggaaaaaatactgcacgtttataactggtctgattatattgccccagacacgctggtaaatttccaaaaggaaaccggcattaaagtggtttatgacgtgtttgactccaacgaggtgttggaagggaagttgatggcggggagtaccggattcgatctggtggtgccttcggccagtttccttgagcgccaattatccgccggcgtatttaagccgctggataagaacaaactgcctaattataaaaatatggacccggaattactcaaactggtgagtcagcacgatccggaaaataaatacgcgatcccttatctgtgggcgactactggcattggttacaacgttgataaagtgaaagcggcgctgggaaccgatgcgccaatcaacagttgggatttggtgctgaaaccggaaaatctggagaaattgaaaagctgcggagtgtccttcctcgatgctccaagtgagatttttgccactgtgctcaattatttgggcaaggaccctaacagcagcgatgccgctgattacaccggcccggcaacagatttgctgttaaaactgcggccaaatattcgttatttccattcttcccaatacattaacgatctggctaatggtgatatttgcgtagccgttggttgggctggtgatgttatgcaggcctcaaaccgagcaaaagaggcgaaaaatggcgtcaatgtggcttacagcattccgaaagaaggggctttggcattcttcgatgtttttgccatgcctgcggacgctaaaaatcaggatgaggcttacctcttcctcaactacctgatgcgcccggaagtgatcgccaatatcagcaaccatgtgttttacgccaatgccaataaagccgcgacgcctttggtgaatccggacgttcgggataatccggggatttacccgccggcggacgttcgcgccaaaatgttcaccctgaaagttcagtcgccaaaaattgatcgggtgatgactcgcgcctggactaaattcaaaacaggtaagtaataccgttgattgagccgttggctgttttcagcggccaatctggtatcacctaaaatgatgaggggagaaacagtagggaaaccggctgtttctgttgctattttgtgccgcattatgatgtggcctcttctgcttctacggagagcacgcagagtgaatgatgtaatttcccgtccgccgttgaaatccctgaaggcgtttacccctttattggaaattcgcaatttaaccaaaatcttcgacggtcaggcggccgtggatgatgtcaatctaaccatttataaaggcgagatttttgctttgctcggcgcgtccggctgcggaaaatcgacgctattgcggatgttggcgggttttgagttgccgactcaagggcagattgtattagatgggcaggatttgtcccatgtgccgccttaccaacggccaattaatatgatgtttcagtcttatgcgttatttcctcatatgaccgtcgagcagaatattgcctttggcctaaagcaggacaaattgccgagtggggaaattaaaagtcgggtagaggaaatgctggcgctggtgcatatgcaagagtttgccaaacgtaagccccatcaattatctggcggccagcggcagcgggtggcgttggcgcgtagtctggctaagcgacccaagttactgctgctggatgaaccaatgggcgcgctggataaaaaactgcgcgaccggatgcagttggaagtagtggatattctggaacgggttggcgcgacctgcgtgatggtgactcacgatcaggaagaagccatgaccatggctggacgtatcgcgattatgaatcgcggaaaatttgtgcaaatcggtgagccggaagaaatttatgaacacccgaacagtagatttagcgccgaatttataggttcagtgaatgtctttgagggcgtgcttacggaacgccaggaagatgcgctggttattcgcagccctggcctgcgtcatccgttgaaagtggattcagacgcttctgtagtcgacggggtgccggtgttggttgccctgcggccagaaaaaatcatgctgtgcgaaagcgtgccggaagctggttttaactttgcggtaggtgaagtggtacacattgcctatttaggggatttgtcgatttaccatgtcaaactccatagtgggcaaactattagcgcccagctgcaaaacggccatcgttatcgtaaaggtatgccaacctggggcgatgaagtgcgtctgtgctgggaaacggatagctgtgtggtgctggggagctagaagatgatacctaattcggttcaagcaacgccggagccaccaacccgccaatccggtgtgttaatcgctcgcctacagcgttggcaaatggctcatggccgcaaactggtgataggtttgccctacctgtggctgtttttgctgtttatgctgcctttcctgattgtatttaaaatcagtctggctgaaatggcccgtgcggttcctccttacaccgatctcatgacatggatggatggcaagctggatatttctctgaatctgggaaattacctgcaattgctcgacgatcctctgtatatcgacgcctatttacaatctttgcaggtggccggtatttccaccttgtgttgcctgatcattggttatccgttggcctgggcgattgctcacagcagtcattcgacgcgtaatattctgttgttattggtgattttaccttcgtggacgtcatttttgattcgggtttacgcctggatggggattctgaaaaacaacggtattttgaataacgtgctgatctggctcggcgttatcgatcagcctttggtcattttacataccaatctggcggtatatatcggcgtggtttatgcctacctgccatttatggtgttgccgatttataccgcgctaacccgtttagattattcgctggtggaagcggcctccgatcttggagccaaaccctttaaaacgttcttcagcattattgtacctttgaccaaaggcggcataatcgccggatcgatgctggtgtttattccggcggtaggggaattcgttattcccgaactgttagggggcccagacaccatcatgattgggcgcattttgtggaccgaattctttagcaatcgtgactggccggtcgcttccgccgtagcaaccgtcatgctgttactgttgatcgcaccgatcctttggttccataaacatcagaataaagaaatgggaggtcaaggatgaataacctacctgaggttcgttctgtctggcgacgggtgattctggtggtgggattcacctttttgtacgcgcctatgctgatgctggtgatctattcatttaacagcaataagttggtgacggtgtggggcggttggtcaacccgttggtataccgaattattccatgattctactatgttatcggcagtcgggctgagtctgaccattgcggcggcttcggcgacgatggcggtgatactcggcactatcgctgctttggtaatggtgcgttttggtcgttttcgcggctctaccggttttgcctttatgttgactgcaccgctggtgatgccggacgtgattaccgggctgtctctgctgctcctgtttgttgcgatggggcacgctatcggctggccggcggagcgcggcatgttcaccatttggctggcccacgtcaccttctgcactgcttatgtcactgtggtcatcagttcgcgactgcgggagctggatcgttccattgaagaggccgcgatggatctgggtgccacgccgctaaaagtgttttttgttattaccgctccgatgatcgctccggcgttgatctcaggctggctattggcttttacgctgtcgctggacgatctggttattgccagttttgttgccgggccgggggcttcgacgctgccgatgttggtattctccagcgtgcgtatgggggtgaatccggaaatcaacgcattggcaacgctgatcctgctggtggtcgggattatcgggctgatcgcctggcgaatgatggcgcgctcggaaaagcagcgatcgcgtgaattacgcaaagccgcccatggctgaaatttcccaaagctgctaggctttctctcgatcgcatgccgtctgcgggcggcgttaatgtgaaagataacatcaggttgcgggagagggtggatgagtgtcagtctgggagaagggcaagccaatatgaaagtttccgcagccacgccagtcgccgtattagtcggcggcaccgccattatcgcgactcgggttttaggcctgttgctgctggtagccgaactgggcatgggcggaatgcagctttttatcgcggaaaatctgcaaagttgggattctggcctgatcttgctggctagtctggggctggttttcctcgaaattgcctgcggacgagctgtcatccgtcgtaagaactggggtcgttggtgctatctgctgtgccagattgtggtggtagtttatatgctgctggcttcactggactggttgtatgttgatgtattccgcattgagggcgaaaacgaagccgaggtgttccacagtctgttaatacaaaaaatccccgacgtggtgattatgggtctgttgtttattcctttccattcgaagcgttttttccgccagtcaaaatgagtgtttcccgacgcggggtggtacaatccgcccccattggcggccgagagcgctgcaaatctcaacgtaataaatcataacggtcaatattcatgcattgcgcacagtatacggcgggcagctgccgttcctgtcagtggttggagaaagattactcccaacaactggcggataaacaacatcatttagaaaatctgctggccgggcaaccggtagctcaatggctaacgccggttttcgggcgtgaaagcgcttttcgtaataaagcgaaaatggtggttagcggcagcgtagagcgtccgttattcggtatgttgcatcgggacggaacggcggtggatctgagcgattgtccgttgtatcccgccagttttgctgcggtatttgccgttttgaaggtttttatcgctcgtgccggtttaacgccctataacgtggcgcgcaagcgcggcgagttaaaatttctgctgttaaccgaaagcaccgtcagcggcgagttgatgctgcgctttgtgctgcgttcggaaactaaggtagagcagttgcggaaaaccctgccgtggctacagcaacaattacctctgctacgggttatttccgtcaatattcagccggtgcatatggcaatactggaaggggagcaggaaattccgctgacggagcaacaggcgctggaagaacgctttaatcaggtgccgctgtatattcggccgcagagtttcttccagaccaatcctgatgtggccgccgcactgtacgccacggcccgcgattgggtacgtgagctgaatattggtagcatgtgggatttattctgcggcgtcggcggttttggtttgcactgcgctacggcggaaactcgtctgaccggcattgaaatcagcgctgaagctattgcctgtgcgcgacaatcagcggaaaaactggggctgaaacaggtcagttttgccgcattggattccacacgttttgccaccggcgagacggaagtgccggaattggtactggtcaatccgccacgccggggcatcggcgccgcgctttgtggttatcttagccaaatggcgccgccgtttattctctactccagttgtaatgcggaaaccatggccaaagatatcgctgcgctagcggattaccgcattgagcgagtgcagttgttcgatatgtttcctcataccagccattatgaagtgattacgctgctggtgcggcgcgagccaacggcttgagtttcgaaaagcttaagtgctgaatcatagaaaaagccgaaaatcattgttgaaatccggctttttatctctgtaatttctctggaatatcaggcaattctattgattgcaggaattattgcgggaaccatttgtcattaatggttttataagtgccgtccgccttcactgcatcaatcgctttattcagtttgcccaacagctcggtattctcagggcgcactgcaatgcctaaacctgtgccgaagtattgtgcatcggtaacgtgctctcctacggaagccaattcagggttactcttcagccattcgttgaccacggcggtgtcaccgaatacgccgtcgatacggccatttttcagatctaaaatggcattctgatagctgtcgtaagacacggtctgaatttcaggatgcttttcctgcatgtatttctggtgtgtagtaccgttttccattccgagacgcttgcctttcaaatcggccagagaggtgaacttgcctttatgggcaatcacaatcgcggagttggcgtagtaaggctgagtaaacgcgacctgtttgctccgctcaggcgtgatatccattccagaaatgacagcgtcatagcgacgaaattttagcgcaggaatcaggctgtcaaaggcctgattggtaaaggtacagttggcttccatttgtttacacaatgcttttgccaaatccatatcgaaacctacaatctcattattggcccccatagattcaaacggtggataggttgccgaggcggcaaaacgaatggtttccgcagcgctagcgctaaaggccaccccggtcagaattgtcgccagtaatatctttttcatgcctaaactcctgtctgaaagtctttaatagggtgcaacattacttattgattttattaccgctaaggaacttttagcggtgtgaaataccataatcaattggaattacattgccaccttgtgaattaatatgcaagaaaagtgattaaaaatataataaaaaaatcaacataatcctcttcgccaaaagcgtgttaaaaatgccgcagtgggaaaaatgagcttggcaataatcaggggggaaattgcgtttttgacgtgggatttattcttgacatgaataaaaaaccccggcagataccggggtttcaaagtgcagtgatttaaggcttaattacgacgttcgaaggccagcgcccgacgttcaaccagacgcatcagtagagtcagcaagccgttaacacacaggtaaacaatacctgccgcgccaaataccatcacgtcgtaggtgcggccatacatcaactggctgtaacccatcacttccatcaatgtaatggtgtatgccagtgaggtacttttaaacaccaacactacttcgttggaataagacgacagagcgcgtttaaaggcgaacggcagtaaaatccgcagcgactggcgtttggacattcccaacgcttcgcaagactgccactgaccggcaggaattgcccgaaccgctccatggaacagcagtgtggtataggccgcgctgttcagcgccagtgcgatcatggcacacagccagggttgcgaaagtacatgccacagccacggatattcgcggatcgccgggaattggccggggccgtagtaaatcagaaagatttgtaccagtaacggcgtgccggtgaacaacgtgatgtaaatcttcaccaactgcgtggctatcggggttttcagcgtcagaatgatggtgaaaatcaacgacagtaccaacgccaccagcagcgaaacaaaggtcagcgtcaggctggtatgcagcccttttaggatctcaggtaaataatcaaacatcaggatgggctccgttcaaaacgcgtggtacggagttcaatcagcttgattacatactgacttagcagagtcaccaccagataaattgcagcggcgatcatataccaggtaaaaggttcctgtgtgcgcgtcgcgatgcttttggtctgcaacatcaggtcatttacgctaatcaacgacactaacgcggtgtctttcagtaaaaccaaccactgattacccagccccggtagggcgtggcgccacatttgcggcataatcaggcggaagaagatcgtcgcctgactcattcccagagcctgcccggattcccattgaccggcaggaatcgctttgagcgcgccgcgcagcgtttgcgaagcataggcagaatacagcaacgccagcgcaatcacgccgcacaggaaagggctgacctcaaatgtgtcgatattcagcttcaccggcagttcgaacagatagaaattcagagtgaagccgtctgacagcatcatcagtaattgtgatgaaccgaaatagataaatagcacgaccagaatctctggcaggccgcgtagcagcgtaacccaggcggtgcccagatagctgatgaccttccagcgggaggattcccaaacggcgaacaacattgccagaatgaggccgagaaccagtgcgcaaacggcaaggccgacggtcatgccggcggcgcttgctaaaggttgaaattcattcatgggtgcttaagttactgttggaaccattttttgtaaattgtctgataggtgccatcggctttcactttcgccagtgccgcatctaacttacccagtaattcggtattgttctgacgtaccgcgatgcccagaccggtaccgaaataatccgcatcggaaattttgtccccgaccggcatcagttcatgactctgcttcagccactcgttgaccactgcggtatcaccgaatactgcgtccagacggccattttttagatccagaattgcattctggtagctgtcgtaaggcactgcggtgatttcagggtgcttttccaacaagaatttctgatgcgttgagccgttttgcatgccgacgcgtttaccttttagcgcggccagatcggcgattttgcctttctgagcgataaacagcgctgagttatcgtaataaggtttggtgaacgcaacctgttttagacgctcaggcgtaatatctacgccggaaatcactgcgtcgaaacgtttgaatttcaggctcggaatcagactgtcaaaggcctgattggtgaaagtgcagttagcctgcatctctttgcacaacgcattggccagatcgatatcaaaaccctgcattttattattagcatcaataaactcgaacggcgggtaagacgcttccgccgcaaaacgaatggtttcagccgcagaagcagacagactgatactggcaaggaccgctgcaattaataattttttcatcgaaaattcccaattagatatcaatgtgacagatagctggcaaaagcttcggtgtgaggctgggcgaaatgactggcatcgccttgttccactacgtgaccgttttccatataaaccacccgactggcagttttacgggcaacttcaacttcatgtgtgacgataacctgagtgataccggtctcggacagctcgcgaattatgctaacaatttgcgcggtaatttccggatcaagcgccgccgttggctcatcaaacaacagaacctgtggctccatcattaatgctcgcgcaatggccactcgctgctgttgccccccggaaagatgcagtgggaaacggtcggcaaagtcggtcagccgtaaacgggacagcaattttttcgcgcgcgccatcgcctgatctttagatagaccaagcacccgacaaggcgcttcaatcaggttttgcaccacggtcagatgcggccagagattatattgctggaataccatgcctacattctgacgcagttcgcggatcgctttcgcgtcaggagcttgggtaaagttaaaatggttacccgcgatctgtaatgtcccagagcgtggcatttccaaaaggttgagcacgcgcagtaaagaacttttacccgcgccgctagggcccagcaaaaccagggtttcccccgctggacagttcaatgtgatgtcgaacagcgcctgatgtgcgccgtagtaacagttaattccgttaagttgaatactcatgcgccaaatctgaatagccaatgatgcggggaatgttaacttccgcggcatacttatgcaatctttgtgcgttaaaatttattaataaccggttggaacccgcaaagctagcataacctctgggtttatttcccgtggagaggaatttgtcgtgtggtgaataaaactggcagagaattcactgaggcgcataaatggctgccaccagtggtgcgattctccggccagtttattgtctgagctagcgctgacccaacagctggcgcagagagctggctggagcattggcccccataaagcgaatatcgtctactacccagcaactgccttctcgtaccatcaaaacttcatcctgccagcgagattccttaccgtccggcgcgcggtgtaccagagtcactcgtagcggtatatttttggcatcggtgttgggaatggtggaggcgctggccacatctgcgtcactgacgccggcgtaaacgctggcgatggcctgatcggcatgggtggtcgaacggttagcgctctgcgtctggcgcgccttttgaatatcctgatacagagcctgactcaggaaaggacgcagttgttctgcggaataattagcagacgcagtgcccgcagcgcccatttgctgtacgcgtaagttatagaactgttcagcgacttgatccgggccgccttccacgcaagggccgttgcgactgccgatatccttaaacgcaggtgtaacgggagtggtacaggcactcagcagtaacgccaagggtaataccagtgcaatattttttttgttcattttattacctatgtgaaatgccagacatgcaactcaatcatgcagttaatatagtataaatttatttttacggatgaacttagggtgcgtcttatttacttggagttcatgttcatgttgttataaatatctatctgaaaatgatatgtaccgcctattatttgggcgatttagggtttttatctttggtttaaggaatatgccatgcagttatctaccactccgacgttagaaggttttaccatcactgagtattgcggtgtggtcaccggtgaagccattctgggcgcgaatatttttaaagatttcttcgccggcgtgcgggatatcgtgggaggccgctccggtgcctatgagaaagaattgcggaaagcgcgacaaattgcctttaaagaactgcaggaagaggccgtgcagctcggagccaatgccattgtaggcattgatattgattatgaaaccgtaggaaaagatagcagcatgttaatggttagcgtcagcggcacagcggttaaagtatcccgttagtggttaaattggcttggtaatccgaattgtttgctgatcgtgtcggtatagaataaaaaggtaacgaatattttacctttttattcaacttattaggttaattcatttaacgcattcctcttactcatacctattaacgcgaaacgcgaaattagtttttattaggtaaaatccggaggaaaccgataaggatatcgagatgaaacaatgcttctggatgctgtttattatgctgttggtaccgtttcatgcgctgggggctgtacaggaagacaaggctttggttgaccaagggagttttatgttgaatgactctcgtcaggcaatgggcgtcgatcggcggattcgctttttggttttacattatacggcactgaattttcctgaatcccttaacgtgctgacaaccgaacaggtcagcgcgcactatttggttccagcttatcctccccgagatcaccatagtggtaaacccgtcgcctggcagctggttcccgagcacctcagagcctggcatgccggagtgagcagttggcgtgggcgaactaatctcaatgacacctctataggcattgaacaggaaaacccgggattcaccagtaccctgttggggaagatacattggtacccttacacacctcaacaaattgaactggtcactgctttggcacataaaattatcgaacgttatgaaatagagccacgtaatgttgttgctcacagtgatattgcgccacagcgtaaagaagatccggggcctttgttcccttgggagcatttggcgaagcaagggattggggcgtggccggacgtcgcggatgttcaatattatctggggaagaggcgtgcagatcgggccgtgccagtaatgccgctgttagctaaactcagctgttatggttatgaaatcacgcctgatatgacgccggaacagcagagaagagtgattagcgctttccagatgcattttcggccctcggatatacgcggtttgcctgatgcggaaaccgaggcgatagccgatgcattattggttaaatatcataagcctgaggaaaataaggatgtcgagcttcggatgagtgagtctgcgctcaatagcgtgagtgccgagtgcgataaactctaaaagtgtcgcgaaaaagcagcgtagcccgttggtttcgctgcttttcagtattaccctcgtagctttccgtgttctttcagccagcgagcagtgcggttaatgctttcatccaaagaaaccagcgagcgatagcccaattctttttctgcccggcgggtatccaaagtcagatcgaagttgagcttggcgacgccgtagtgggtcagaaccggctctttttcgcttttattccccattctttccatggtacgcgccatcacgtccagcattggatagggaatcgaacgaatgcggcacggcatatccagcgcgtccaacagctgctgaacgatggtgcgcagcgggcgcggctgctgattggtgatattgtaagcgcggccagattcggtggtggtggattgcgtcgccagccacatggcgtgaacggcgttctccagataggtcatatccaccaacgcttcgcccccgcgtggcaataacaaggtgccgtagtgcttaatcatgtgtaataagcgcggtagcatcactttgtcatgcggaccaaacagcccctgtgggcgcaaaatggtaaagtgggtttgcgggttagacagagccaactgccggatcacttcttcccccgcagctttactgcgggcaaattcgttagcaaaacgcgccggtcggaaatcttcctgaatatttcggtgatggtgataatcgaagtaaatcgctggggaagagatatgaataaaattctctaccccgtaagcggttgcccattcccccaaacggcgagtcgcgcggacgttcgccagttcaaaagcctgctcggtaccccaaggggaagtgaagctggagcaatgccagagcgtatcaacatcggccagcatggctttggcctgcgatgaaaccagattcgttaaatcggcatgaataaattcagcgcccattttttccaataggctacccatggcctgattacgaccggttgctgtcactttgataccttgacggcggagatattcaacggcgtttcggcctaacccactggttgcgccggtgaccaataccttcataacgaattcggttcccaccaaaaatcagagtgctggcggcaatatcatgcgcgcagcaaataaggtgccattctttcgtgaaatgatgcgctatgcaatcagaaagggctgactaagggttgcaaactgtgtggttgatcgacaaatgcgcgctatttgtgcgcttcccgatcgtattgctcggccagttgcgcaattctcttcgccatgccacgaaaaataaacaggtgagcgggcatcataacgaaccaatacagcagtccgctgaagcctgccggatgccaccaggcccgaacatcaaagcggcgtttatcccctaaatctttgatggtaaaggtcagtcgccccaatcctggcgctttcataccaaacatcatggccagttgacgcagtggttttatcgtaatcaccttccagccatcgactaaatcacctaattccagcgttggtcggtctggtcggccgtaaacgacgcctccgcctgccagatcgtccatccaggcgcgggttttccacagcggattaccgtaaaaatagccttccgggccaccgatttgctgcacgacatgccacaaagcttcgctggaagctgtggtatccaattggcaaccggcctgtttgggatagaagccgtaaccgggacgccagcgggcgcgggcttccggatcgtaaccccaatcggcggagtcaacgactttgtcttcctgccgcagggtttcccgcaccgcatcgtcaaagctgattaaattctgcggtattaatgcctgtaacggagcgccgtctgcgggtaagtcatgattcaagccctgaatcaatgcgctggcaatactggtcggcaccgaggtaatcatgctgataaaatagaccgaaataaaacgggtcggcagcggaatcgggatcagccagcgacgtttaccgctaatggcaataaagcgctcaaacagggtctgataactgatgtattccggtccggcgacgtcaaaaatgcggttttcatcagagggataattcagtatttccgttagataaactaataggttatccagcgcgataggggatgacttggagcgaacccagcgcggcggcgtcaaaattggcaggttgtacaccatatcgcgcatcacttcaaaagccgctgaaccggggccgacaataatgctggcacgtaactcagtgacaggtacgccgctttgtcgcagtaaatcgccagtcaattttcgggcgaccaaatgtggggaactgttttcctccggttgcaatgctccgaggaatatcacctgttttaccgaggagtttttcagcgctagctgcaagttactggcggcctgtcgctcctgttctaccaagtcctcgccgtcgcccatggcgtgaaccagatagtagagaacgtcaatatcctgtagtgcgtgacgtagggtctccggctgatacagatcggcaaaacagcagcgaacattcggccactgttgttcttccagccattcaattcgacgtgcagcggcggtaacctgatgcccttgctggcaaaggcgtggaattaaatgctggccgatgtagccactggcacctaacactaagattcgttgtggtgtcatgatagtcactcggtaaggttggcggtaacagaatcgatatcttgggctgtttctgccgaaatagaaatgccctggcgacagaatatcaccaaggcgacgtagacaaaaaatattattaatttcagttatgtaatgtcaaaaactcataccacagtgcaaccactcgttctaaatcacttcggctaacgtccaaatgcgtaatcatgcgggtcactggcccggcgctgattaacacgccgcgctcacgcatccacggccccatttgggccgccagctctgccgactggcgaatgtacaatatattggtttgagcgccgggagcgataatctctacgccgatatcccgcaacttttgctccagccacactgcgttgtcgtgatcctgctgcaagcgctccacgttatgctgcaaggcgtaaagtcctgcagccgccagaataccggcctgacgcataccgccgccggttattttgcgccaacgtatagcgcgcttaacgtattcttcgctgccgcacagtaaggaaccgaccggtgcgcccaatcctttggaaagacagagagtcagggtatcgcaatactgggtgatttcccgtagcggaacctttagcgccactgcggcattcataatgcgcgccccatcaatatgtaaagccagatttttttcgcgggtcaacgcccatgcctgttgcagataactgatgggcagcacgcggccgctgtgcgtattttccagactgagcagacgggtttgagcaaacagaatgtcatcaggtttgatggcggccagtactttatccaacggcaaactgccgtcgtcattggcatccagcggttgcggctgaatactgcctaaaaccgctgcaccgcccgcctcgtacagataattatgggctttttgtcccacaatatactcatcgccacgctggcagtgcgttagtaatgctaccagattggcctgagtcccgctgggtaagaataatgatgccgctttgccggagagccgcgctccctcggcttccaacgccttgactgttgggtcctcgccgtacacatcatcgcccacttcggcattggccattcgctgacgcatggcaggagaagggcgggttactgtgtcactacgcagatcgatatacatatcgtgaaagctcttgataaaggaaagtcgcgagggcaggatgagtaacctcacagggtagccgtcggttattttcccctgaaatcgttagtatctggccggataaaagtttacccgtgccagaccttgatcgctatcatatgtcacaagatatatgtcacaagacaaagtgtggtacggcaatatctgacatgtgaccgactcattgattaacgtagccagttggttttggccagctcaaccacttcatccccgcggccattgataatggcgcgcagcatatacaggctaaagcctttcgcctgctcaaatttgatttgcggtggcatggaaagctcttgcttggcggtaacgacgtccaccaataccgggcctggatgggcgaaagccgtttccagcgcgctgttcagctcggatgctttctctacccgaatgccttttattcctgccgcattggcaatggcggcgaaattaggattgtgcagatccgtgccgtcggtcaggtagccgccagccttcatttccatagcgacaaaacccagcacgctgttattgaacaccacaattttcaccggcagtttaagctgcgccagtgatagaaaatcgcccattaacatagtaaaaccgccgtcgccgcacattgctaccacctgacgttctggtgccgttgcttgcgcccctatcgcctgcggcatggcgttggccatggaaccgtggttaaacgaccccagtagacgacgtttaccgttcatttgcagatagcgggcggcccagaccgttggcgttccgacatcgcaggtgaaaatggcgtcgtcggtcgcataatggctgatttgttgcgccagatactgtggatggatcggctgatcgtcattggctgtcgccagtccatccagatctttacgagtggttcggtagtgttccagcgctttatccagaaaacgccggtcgctttttacctgtagttgaggcaatagagcgcgtagggtcgttttgatatcacccatcagcgccctattcaccgggcagtgagcgccaatgcttccaggattaatatcgatttgaataatgttagcgtgagtaggataaaaggcccgataagggaactgagtgccgagcaaaatcaacgtatcggcattcatcatggcgtgataaccggaggaaaaaccaatcagcccggtcattccgacgctatagggattatcccactcaatatgctctttgccgcgcagcgcgtgtaccaccggtgcttgcagcatttctgccagtttcaccacttcgtcatgggcgtcggcgcagccgctaccgcacatcaacgtaatgtttttagcggaatttaaggtttcagccagcgcttccagttcgctcatcggcggctgaattagcgggtgttttggggtatgccagaccatcggcgcatcttccggcgcggcttgcagtgctacatcgccgggaagcacaatcacagaaacgccgcgattaaggatggctttgcgcatggcgatttccaatacgcgcggtaattgctcaggatttgtgactaattcgcaataatgactgcattcgcggaacagttcctgcggatgcgtttcctgaaaataaccgctgccgatttcactggagggaatatgtgcagcaatggccaaaaccgggacatggttacggtgacaatcaaaaagtccgttgattaaatgcaggtttcctggcccgcaggaaccggcacaaaccgccagttcgccggttaactgcgcttctgctccagcggcaaaggccgcaacttcctcgtgacgagtacctagccattcgatggtgcccatgcgatgcaaactgtcacttaatccgtttaaagagtcgccggtgacgccccaaattcgtttcacgccagcgagttccagcgttttagccaccagtgttgctacggtctgtttcatacttcccccaagatttaatcgcgatgcttttattccaggaggagaaagtatggtctgtttaagagttaatgccctattaaccggggtttatattgtgtaatagggcattttttgttgtcgtcaggccaattgggtatcgccctgcaattgacagctacaggccaacacgtaaccctgagcgatttcttccggcgtcagcgtcatggtgctggtggtcgtgtaattaccggaaatgattcgagttttacaagaaccgcagacgccagcacgacaagccgcggagacaggcaccttattttcttcaagtgcgaacagtaaagacgcgccgaccggaactcgcagttggcgtagcgggcgattaatggttaatgtcagttggttgcctgactgtggtttttcttcttcgatgtggaactgctcttgctggaaacgttctggcggtacctgttgctcacggcaataattttccacccacatcctataaggcgcggggccgcaggtcatcactcggcattgtcgaatatctggcgcgattttctgcatgatttccgcagaaattctgccgctgaaaaaaccttctttagcccccgattctgccatcaaagtaatatgtaaccgcagcgggtgggcttcaatcagcgcctgccattcagcggaaaaaataacgtcatctggggtacgaacgttaaaaatcacccgaatatcggcctgcggtcggtgggctaacagccagcgacacatcgacataattggcgtcacgccgcatcctgcggccagcattaaataacggtcatcctgattatcggcacaggtaaattccccctgagcgtcggatagccacaggtaatttcccggctgtacctcttgagttagccaacgagaacccgtgccgtcgggcaggcaacggatagtcaaacgaataaagcggctcaggcccggagaagaggaaagggtataggcgcgcagggtatcttcactgttgcgaatactcaccaacgcatattggcctggttgatacggataaaaatcgtggttgattaattgcaggctccaaacatctggcgtttcctgcacaatagagtgcacctgcatacgattagggcacattggtgttggcatcgtcatagcaaaccctcgtggttgcgcggtaatagaaacggtcagcgccggaggcgaatagcgctgaccgcaccgtggcttaggccaccagaatttcgttcaaatcttgttcaaccgaggtgatcgggcgcataccgaatttttcattcagaatggccagcagattatcggtcaggaagcccggcgccgttgggccggtatagatatttttgacgccgagagacagcagcgtcagcaaaatgacgatagctttctgttcgaaccacgacagcaccagacttaaaggtaagtcgttgacagtacagcctaattgctcagatagttttaccgctagcatgatcgcggagtaagcatcattacattggcccacatccagcagacgcggtaaaccttccagcgtgccgaagtccagtttgttaaaacgatatttaccacaggccagagtcatgattaggcaatcttgcggaatattgcgggcaaaatcggtaaaatagctgcgttcgtcccggctgccgtcacagccgccgaccagaaagatatggcgcagttttttacgagaaaccagatcgataaccgtatccgccgaatttaatagagtctggcgaccaaaacccacggtgatcatgtgttctagctcgttgtacgggaatccggccatacttttcgcttgcgtaataacatctgagaaatcatcgccttccaaatgattgacgcccggccaaccaacaatgctgcgggtccagatacgatcgccgtaattacccacgttgggatcgataatacagttggaggtcatcactatcgggccggggaatttggcaaattcgatttgctgattttgccagccgctgccgtagttacccaccagatgcgggaattttttcagctcgggatagccgtgtgctggcagcatttcgccatgggtgtacacattgacgccttgtccggcggtctgctccaataacatctgcagatctttcagatcgtgccctgaaatcagaatggctttaccggcgaccgggcgcacgttgaccgccgttggctgcgggtggccgtatgcctgagtttcgccgctgtccagaatcgccatcacgttgaagttcatctggccgatgcccatagcattattcaacagggtatccacatcgcgcggctgagtgcccagccatgacataagctcatgatattgcgcgtagatattttcatcagactgaccgagtacgtgagcgtgttccatataagccgctgcgcctttcaagccatacaaacacagcatccgcagaccgtgaatgtcatcgccaacctcggctttatcactgtttaaagcgaactgttgagactgttgttgcagtgttggaatgtcgttagcttccaattgtaattcggccatcgggtgatctaccgaggcgctggcatccagcaagcggcagcgtgcggccagagaatcacgcagtgcgatagcttccttggcataaccgacgatgcgctcagaatcaaagttaacgttggtcagcgttgagaaaaaggctctgggtgcgaagctatcgatatctggatcgataataccgagctgtctggcgcgtaatgcccaagcggaaagcccctgtaatacggcaaccaacaggtcttgcaaatcggacgtttcagcggttttcccgcacataccctgagcgtaagagcagccattgcctgccggggtacgaatggtttgttcacattgcacacagaacatgattctttccttttaaaagtgcatttgtaatgcgtgtttaaaagcatagatgtgccaaggcatcttaaaaaggcttttgtaatgcaactttaacttatcttgatttggcgcaatttttgtcgcgaatgagactttttcgctttaatggtgaaatgaatagaatttagcgggccaatacattagcccgctggggacggagaatatcaggagaatagcgcgatcagtactggagccagtaagctcaatatgaagccgtgcacgatcgcggcaggtaccatttccaggccaccgctacgttgcaataccggcagggtgaaatccattgaggtggcaccgcagaggcctaaggcagtggaacggctgcggcgaaccagcgttggaatcagcataatggcgactaattcacgggctaaatcgttgaagaaggcggcgctgccgatcaccgggccaaatgcgtctgtcagtaagatacccgagagtgagtaccaaccgtagccggaggccattgccagaccggttttcagcggtaaaccgaggaataacgcggctaacgcgccgccagccagcgcactgacagcaaccacgatggcgacaatagtgccgcggcggttaagcacaatctggcgtaaagtcatgccgctattacgcaactggatgccaaccaaaaatagcaggaatatcaatgctaattcactaccttgagcggcaaattgcaacggtggccattcggtcagacccaatagaaagccgatgataactacgccgcacagtttcagcgattccagcgccatatgtaatcgggaaggcagagcttcctggcggtgagtatttttccacggccttttatgttcgagcaaaaatagcgccaacaggttagcggataaaatgcagataaaacatacgctggcgtattggaaaataagcagcaggtttgcgctaaggttttccagaaatgccaagctgatgcccataaaaaataaaataacgtaaaccatccagcttaatagccggttaatcgcctgaattaaagatttacggctaagcgggatcaaataaccgataattaacggcaacagaatgatcagtaatcctgaatacatgtgagttaaagcgtcctttacgcgtcaggctgaattaagcagacgtaaggctatagccggttggctatagcaatgagatcgggcattgttgagtgaaggggataagctatctaaaaaggcggatagagtaaaggtggaaagaccggcggatggcgcttgacctgaaaggattttttgcgccattctcatgaatgttaacgcgttaatgacataggcttcgctggtaatgatttaacttcgcacgggaggcgtaaatatgttcctagaacgcgtggaaatagtcgggtttcgtggcattaatcgtatttctttgacgctggatgataatacggtactcatcggggagaatgcctggggtaaatccagcctgttggatgcgctcactctgttgctgtctccggaaccgcgactctatcatttcaccgtgcaggatttttattatccccccggtgatgaagcggcaaaagatcggcatcttcaggttattttaaccttctgcgagaaggatatcggccattggcgttccccacgttatcgccatttggcaccgctgtggagccaatgtgaagacagtttgcatcgtatttactaccgagtggaaggcgaactggccgatgacggcaccgtttgtacctggcgcacttttctggatctggatggccagccgttgccactccacgatattgaaaaactggctttaggtattattcgtatccatccagtgctacgcctgcgggatgcccgctttatccgccgtttacgtaccagcgtgccggaaagtatgcctgggcaggataaagttgcgctgaatcagcagttggatcagttagggcgtgaattagtacgtaatccacaaaaactgactaataccgagctacgtcagggattagacgctatgcgccaattgctggaacattactttgccgagcagggttctcaaacgcctcagcgcaatcggccttcgcgcccgcagccggaacgtcaggcgtggcaagcgctggacagcatcaaccgcatgattgccgagccgaacagtcgaagtatgcggctgattttactggggatgtttaatacgttattgcaggctaaaggctcgattcatctggatccgcacgcgcgcccgctgttgctggtggaggatcccgaaacccgcctgcatcccattatgttatcggtcgcctgggggctactcaatcagcttcctttgcaacgcatcaccaccaccaactccggcgaactggtttctttggtaccggtagaacggatttgccgattggtgcgtgagtctgcgcgggtggcaacttaccgtattggcccgaaggggatgacgccggaagacagtcgccgcattgccttccatattcgttttaaccgcccgtcatcactgtttgcccgctgctggctattggtggagggtgagacagaaatctggttgcttaacgaactggctcgccaatgtggctatcactttgaagctgaaggggtaaaagtcatcgagtttgcgcaaagtggtttacgtccattgctaaaattcgccaatcgcatgggcattcagtggcataccctgaccgacggcgacgatgccggtaagaagtatgccgctaccgttcgggatattgcggagcgcaacggtgataatgaacgagatcgcctgaccatgttgccggcgccggatatggagcaattcctatatcgtgcgggatttggcccggtttatcatcgaatatcagcgataccgatgaatgccaaaatgccgccgcgccgggtgattgagaaagcgatacatcgcacttccaagcccgatttggctattgaagttgccactcaggctggggtgtggggcgtgagttcggtaccgccaattctgaaaaagatgttttcccgcgtggtgtggctggctcggggtcgcgcggattaaccgaggtattttcagcacaagggaagtgggcgctaatcccgctttccaattgatccaataactgataacggcggcgatattcagcgcgtttcttgctagggatatcctcaatggctttccgcgctacgcgggcaggcagcagaaaataaccttcctcgctcatttggccgcccagagattgccagaaaccatcataatcggcgtgtaacttatcgcttttccgttgacgatagcgccagcttttatagatatgagtatcattacccaccgctataatctgagtgatccccaacatttcggccagactacaggctgcttccagcaggatacgtttcgggaacaggccgtgacagtttttggtgctgatttgaatttcttcatgagctacctgcggtgcggctccttgtaacccaccaataaacaacgtttttttctgtcgataactcatcaaactaaaggtcatgagcgccagtgtttcaccttgttgattggtaaacatcagcgtggcttccccttctttattgagcatcggcaacgtaccgaggtaaacgcggtactggctgtcattgcgtccgcttaattcggccaatttataaggcttggattggagatatcccgtcgccaatgctgatggcatcaattcattgaccaaccgatagtgctctttgatcgcctgtaatccctgacgtttactgagattggcgctgagatacggacggtgcagtttgcaaggtaaatccggctgagattgcagcagcgtaccgagctgcgggttattcgccaattcactgagtagcgccagagtaacctgaggataaatcagcgttctggccagaaacttaaagcgaaaagccggttttcgccacacctccggcaggttttcttccccttttatcaactgcgaaattaactgccagcgacttaaatgattcggcgctgatgggggtgaagtgaataaatacattggaatatccgtttcgttatcaaactttgtctctattgaagcaagggggaactaaacagcgactcaatgcgtcttatgttggtattatttatatgatttgatgtttatattacgtttaaattcgcgcactctcagagtgataatttaatcagcgctacggtattttcattagcatttgtctatttcaagcataaattttaataaggtaggtaattaatttgacgtggtttagcggacgtaaacgacgctggattctggcgattgtgattctggcaattggcggtttttgggcgatcaagcatggaatggcaccggctgcgacacagtatcaaaccgtcaaagtggttaatcgggatctgcaacaaaacatattagcgataggtaaattggacgcggtgcgcaaagttgatgtgggtgcgcaggtgagcgggcagcttgaacggctctatgtggagatcggcgataaggtcaagcaggggcaactgctggcgatgatcgatccgcagcaggcacagaaccagatcaaagaggtggaagcgacgctgcaagatcttaacgctcagctgttgcaagccaaagccgagcggcagttggcggaggtgacgctgagccgccagcaacaattggcgaagctacaggcggtttctcttcaggttctggatcaggccgcaacggatttggcggtaaaaaaagcaaaagttggcacgatcagcgcacaaatcagcaaaaccaaagccagcctggatacggccaaaattaatctggattacaccaaaatttccgccccgatggacggcgatgtagtgcaaattactacgttgcaaggccagacagtgattgccgcacaacaggcgccaaacattctgacgttggccgatatgcgtacgatgctggtgaatgctcaagtttccgaagcggatgttatccacctgaaaccggggctgaaagcctcattcactgtattgggtgatccgtcgaagcattttgacggtgtactcaaagatattcagccaacgccggaaaaagtgaacgatgccattttctattcggcccgctttgaagtacctaatccggatggcctgctgcgcctgcaaatgaccgctcaggtatcgattcaattatcgaaagtggaacaggctaaagttgtgccactctccgctttgggtaacgaattgggcgtgaaccgttatgaagtcgcggtgctaaaaaatggtaaggaagagaaacgagaagtgaccatcggcattcgcaacaatgtggatgcgcaggtgcttagcggtctggaagtgggtgatgaagtgattaccagccgcggcgtagcggaggctgaataatggcggctttgcttgagttaaaaggcattcgccgcagttatcagtctggtgaacaaacggtggatgtgctgcaggacgtttcgctggaaattaatgcgggtgagctggtggcgattattggtgcttccggctcgggtaagtcgaccctgatgaatattcttggctgtctggataagccaagcgaggggatttaccgcgtggccgggcaggacgtcgatagcatggacaatgatgcgctggcggctttgcgtcgtgaacactttgggtttattttccagcgttatcatttattacctcacctaagtgcggcgcataacgtagaagtgcccgcggtctacgcaggtttaggaaagcatgagcggcgggaacgcgccaaaatgttgctaacccgtttgggattaggcgagcgcatcagctatcgtcccagccagctttccggtggccaacagcagcgcgtcagtattgctcgcgctttgatgaacggcgggcaggtaatattggccgatgaacccaccggcgcgttagacagccattccagcgttgaagtgatggtgattttaaagcaactgcaacagcaggggcacacggtcattattgttacccacgatcctacggtcgcggctcaggccgagcgaatcattgaaatcaaagatggccgtattatggcggactccggcagtaaaacaccgccaaaaaccgcagagccggatacgcaaagtctgacgccgccagcgccttcatggcagcaattgaccgggcgttttcgtgaagcattgctgatggcatggcgcgcgatggcctctaacaagatgcgaactgcgctaactatgctcggtattatcataggtattgcttcggtggtttctattttggtggtgggcgatgcggccaaacaaatggtgttggcagatattcgcgctatcgggacaaataccatcgatatttaccccggaaaagactttggcgatgacgaccccagtaatcggcaggcgctggtttatgacgatatggtagcgctgaaagcgcagtcttacattaatgcggtgtcaccggtgatctctggcagtatgcggctacgcttcggaaatatcgatgtggccggcagtgtatccggagtgagcgcgcagtatttccgtgtttacggtatcagtatcgagcagggcacggcgattacgcaggatcaggtcgatcgacaggcgcaggcggtggtgattgaccgtaatactcagcgccgacttttcccgcatgtgaaagatgtggtggggcaagtgatgctgatcggcaatatgcctgcgactatcgtcggcgtggtggaagaaaaacaatcgatgtttggcagcagtaaatcactgcgggtgtggattccctacaccacaatggctaaccggttgatgggtaaatcttattttgattcgattacggtgcgaatcaacgatggctataatagtaaggaagccgaacaacagttagttcgcttgctaactttgcgtcacggtaagaaagatatctttacctataatatggacagcttgctgcaaactgcggaaaaaatcactcgaaccatgcaattgttcctgacgctggtagcggtcatttcgttggtggttggcggtattggtgtgatgaatattatgctggtatcggtaacggaacgaacccgtgaaataggtattcgcatggccgtaggggcgcgttccagcgatgtcatgcagcaattcctgattgaagcggtgctggtttgtctggtcggcggcgcattagggattacgctttcctttgctatcggtctggcggtagaaatggtgatgcccaactggcaggtatctttccctgcggttgcgctggtcagcgctttcctgtgttcgacaattattggcgtggtcttcggttatttgcccgctcgcagtgccgccagattaaacccaattgacgctttggcgcgggaataacgtttacggacatagaatttacgggaaataggataaacgagcagacgcccaggcggtgttaacgtaatattatggcgttagcgggggcataaaaaatgataaaaatgccagtcgcagttcggctggcattttgaattgctgtgctgccgtagataaaagctaacggcccgacggtgtgacgttgatgtcaggcgagagccagcatttccagaggcacaatcaggctggcatgattgcctttggggccctggtggacatcaaagttaacctgctgacccgcttttagcgttcgataaccatccatctggatagtagagtagtgtgcaaagatatcttcgccgccgttctgcgggcagataaatccaaagcccttggcgttattgaaccatttaacagtacccgtctccatacttctacgttcctcgcaaggctattctaattttagatgaggtaatcgctggttaaagtgagcgcggattggttaaaactccatcagctcacaaatttacactctagtggaaatgcgattaacgtcaagaggacggcttttctcaggctgaggagttcgccaaagtttgatgcagataacgctattgcgcttatttagttacaattttgttgttgtctgtgcgaacgttctcgcatgcttctaaagcgacacttcacggcaagagatgttaaaataacaatagaaatctgtaccaaatggtcttataaccggagctgagtgttgctcctgtatgattcagtgaaacgatgggtaagcaatgggcaataacaacgactggcttaattttgagcatttagtcaaagataaacaaatcgatgcgctaaaaccgccgtctatgtataaagttatactcaacaacgacgattacacgccgatggaatttgtgattgacgttctgcaaaagttcttttcttatgatattgaacgtgcaacccagttgatgctgaacgttcactacaaagggaaagcgatttgcggcgtgttcactgctgaagttgcagagacaaaagtggcgcacgtaaatcaatacgccagggagaacgagcatccattgctttgtacgctggaaaaagcctgattaaggcaatttattggggaggtgcctatgctcaatcaagaacttgaactcagtcttaatatggctttcgccagagcgcgggagcacagacacgagtttatgaccgtggagcacctgttgctggcattgctgagcaaccctgccgcgcgggaagcgctagaggcatgtacggtggatctggtggcattacgccaggagctggaagcctttatagaacaaaccacgccaacgttaccggccagcgaggaagagcgtgacacccaaccaacgctgagcttccagcgcgtattacagcgcgccgtcttccatgttcaatcatctggtcgtaatgaagtttccggtgccaacgttttggtcgccatcttcagcgaacaagagtcccaggcggcttatctgctgcgtaaacacgatgtcagccgtctggatgtggtgaacattatttcccatggtgcacgcaaagacgagccgggtcaggcgccaaatgcagaaaatccggtgaatgaagagcaggcgggaggggaagaccgtatggagaacttcaccaccaatcttaaccaactggcgcgcgtcggcggtatcgatccgctgattggccgcgaaaaagagctggagcgtgcaattcaggtactttgccgccgtcgtaaaaacaatccgctgctggtcggcgaatccggcgtcgggaaaaccgcgattgccgaaggtctggcatggcgaattgtgcagggcgatgtaccggaagtcatggccgaatgtacgctgtactcgttggatatcggctcgctgctggcgggaactaaataccgcggtgactttgagaaacgtttcaaagcgctgctgaaacagctagagcaggataaagacagcattctgttcatcgatgaaattcacaccattatcggcgccggtgctgcttccggtgggcaagtggatgccgcgaacctgatcaaaccgctgttgtccagcggcaagattcgggtgattggctccacgacctatcaggaattcagcaatatctttgaaaaggatcgtgcgttagcgcgccgtttccagaaaattgatattgttgagccgacgcccgaagaaacggtgcaaattatcaatgggttgaaaccgaaatacgaagctcatcacgatgtacgctacacggcgaaagccattcgggcggcggtggaattgtcggtgaaatacatcaacgatcgccatttgccggataaagccattgatgtcattgatgaagctggtgcgcgcagccgattgatgccggcgagcaaacgcaaaaaaaccgtcaacgtttcagatattgaatctgtggtggcgcgtattgctcgtattccggagaaaactgtctctgccagcgatcgtgacgtactgaaaaacctgagcgaccgtttgagtatgttggtcttcgggcaagataaagctatcgacgctctgactgaagcgatcaaaatgagccgcgcgggtttaggtcatgaaaataaacctgtgggttcgttcctgtttgctggcccgaccggggtgggtaaaactgaagtcacagtgcaattggccaaggcgctggatatcgaactgctgcgctttgatatgtccgaatatatggagcgccatacggttagccgcctgattggtgcgcctccgggctacgttggctacgatcagggcggtttgctgaccgacgcggttatcaaacaccctcatgcggttctgttgctggatgagattgaaaaagcgcatcccgatgtctttaacctgttattgcaggtgatggataacggtacgctgacggataacaatggtcgtaaagcggatttccgcaacgtgattgtggtgatgaccaccaacgctggcgtgcgggaaactcagcgtaaatcgattggcttccaacagcaggataacagtaccgatgcgatggaagagatcaaaaaggtgtttacgccggaattccggaaccgtttggataacatcatttggttcaaccatttgtctcctcatgtgattcagcaggttgtcgacaagtttatcgtcgagcttcaggcgcagttggatgccaaaggcgtgtcgctggaggtcagcgatgaagcgcgtaactggctatctgagaagggctacgacaaagctatgggcgcgcggccgatggcgcgggtgattcaggaaaatctgaagaaaccgctggctaacgaactgttgtttggctctttggttgatggcggctcggtgagcgttggtctggataaagagaaacagcaactggcttacgaattccaaagcgcgcaaaaacgcaaaacggaaggcgcggtacattagtcttagcgcaataagctagttgaatcagacgtgaaataaatggaagggcgatagcgatatcgcccttttttttgtactcagtccgactcattcgaaatgggaatggtgcggaaggggtaaataacagaaaaagcaaaacgccctagccaataaaatggtaagggcgccggaggggggactacatcctcagagctcgctagcaactagcgactgggcagccgattaacggctacggaagacaatgcggcctttgctcaggtcgtacggggtcagctctacagtgactttgtcacccgtcaggatgcggatatagtttttacgcattttaccggagatatgagcggttaccacgtgcccgttttccaattcaacacggaacatggtgttcggcagcgtatcaagaacggtgccctgcatttcaatattgtcttctttggccatcgaatcctctaggagtaactaccttagtttttaaccggcaagataatgccgaaaaacccacattatgtaaagaagtgttggcagtcatcacaccatttctgcaaaattagtctgctgaggaggggataaagcctaatgtggggtgcttttgtaacattgatctttacggcatcgcgatttcgacatccagcgattgcggtaaccagcattcagccggtagcggactaaactggagttgactcaagtgctgcaaaaagtggctgcgagggatctctctcgcacccagcgacgcagtgtgagcgttgaggacctgacagtcaatcagttctccaccatgacgggtaaaatgatgacaaaaagccattaatccgctttttgaagcgttctccacccggctaaacattgattctccgcaaaaaagtgcgcccatcccaataccatacaacccgccaacgagttcattatttaaccatacctccaatgaatgagcgtggcccatttcatgtaattgggcgtaggcctgctgtacatcgtcaccaatccaggttccgtcatcgggacgatcggcgcaggcggcgaccacttcacggaacgcctggttcagtgtgaaccgaaatgggcagcggcgcaggaagcgacgcatgctacggctgatatgtaattcttcggggaacagcaccgctcgcgggtccggcgaccaccataaaatcatctcgcccgggctaaaccacgggaaaataccgcgctgataggccgcgagtaaccgtgatgccgataaatcgccacctaacgccaataggccattaggctcgcgcagagccagctcaggtgaagggaacgcgtaagaatgtgatgagaggtgggtaagacgcataaatccccttaacggcgcttacaggcgcttttggctgtagagtattgataatgccgccgttatcccagcggcatttgataacattagccagaaatcgtcttaaactcacaataaaacttagcggcgctgacggaactgataataccggcctttatttttcaataaagtctcatgatcgccctgttcaacgatctggccgccgtccatcacgcaaatgctatccatttgctccagcccatacaggcgatgcgtcaccagaatcagactcttgtgctgacagtgttggcgcagcagcgccagtatttgttgctcggtttccgcatccagaccttcggtcggttcatccaacaataacaatggagcaggatggagcagcgcccgcgcaatacccaaacggcgttgttcgccaccggaaagtgggcgaccgccgtctcccatccaggcatttaacccttcgtcattatccagaagattacccaggccgacttgttgtaacgcggtgattagttgctcatcgctagcggttgggcaggcgagcagcaggttttgtcgcagcgtactgctgaaaacgtgtactcgctggctgactaccgtcatcatctggcgtagagaagcttcgtcgtagctcgccagcggctggccgttgagccggatttcaccctgattgggatcccaggcgcgggtgagtaattgtaatagcgttgatttaccacaacctgtgcgtcccagtagcgcaatatgctctcctgcggccagtgacagcgttatatcctgcaatacaggcaaaggctggtctggataggtaaaactcacctgtgcgacttccagcgctgcctgtgaagcgatctcagggccggtttgggggaaggtgacttccggcttctgtgcaataagctgcgccacgcgctcagcggaagttatcacctgcccaagatgctggaaagcacctgcaaccggcagtagagcctcaaatgacgccatcgaagcaaaaacaaacagggcaatcaatgcgcccggttggctataatcgccgacgccagccgcggccagccacagcattagcgtgacggtcatgccggtcgccagaatcatcaatgcctgcgccaaacctgccagcgaagcctgttgctgctgacgagtcaaccaacgccgttcgatatcttccaaagtatggcgaaaacgtcctaacgcgccgaagaccaacagttcggcctgaccttgcagccaggcggtcagttgtgtgcggtagtggctacggaatacggtgagatcggcaccgataggttgaccggcgcggtagaaaatcagcggcagaattagcagcagccccagtagaatggcacctagggtcaatgccagctcgacatcaaggaaactcagaccgaaggtaacggcagcgatgatcgccagcgcggcgattaacggcgaaatgacccgcagatacagatgatccaacgtatcgacatcagccaccaagcggttgagcacttcactctgacgaaaacgggcaatcccggcaggggagagcggtaaaatgcgctgaaaggtaaatacccgcaaatgcgccagcacccggaaggtagcatcgtggctcaccacgcgctcggcgtagcgtccggcggtgcgtaaaatggctgaaccgcgaacgcccgcggcgggaagcaaatagttaaaggtatacaaacccggcgggccagcgagtgcagtaccagcgaggaaccagccggacagcgtcaataggccaatgctggccagcaaagtaataatagccagcaaaatgccgaggctaatcaagaaccaatgacggcggtaaagcgccagaaatggaagaagcacgcgcatgattaaagctcctcacggcgataagacagcaggttggcgaaaggcccctcagactgactcagtgtggtgtaatccccttgctgaaccagcagcccgcggtccattacccagatttggtcataatctagcgtatcttctaactggtgcgtcaccagtagcgtagtctgcattcgcgaagcctcgtttaatgctttcatcactaattgttcgctgtgggcatccagactggcggttggctcatccaacagcagtagccggcaaggatttaacaaggcgcgcgccacggcgacgcgctgtgcctgaccaacggatagacgagccgaatgatcgccgatttccgtggctaacccgttgggcaaatccccgaggaactcattgacgtaggcacgttcaaccgcctgttgcagctgctgttcgctggcgtcgggctgattgagcagaatattgctggccaaagtctgctccggcaaataagggttttggcctacccagcttagctggctgcgccatgcctgaggggcaagttcgcgcagttcaatgccgttaacccgcagagagccacgataaggcagaaagcccagtaacagattgagtaatgagctttttcctgcgccactctgcccaacaatggcaatgcgctggccgggttgtagcgtgaaattcaacgggccagccaggcgagtgccgttgggtgccagtatttccagttcggcggcttccagcgtgattaaaccttcgtcgggtaggtttttatccccctgaccgatagcttcgccttcgctggcgaggaacgtcactaatgattccgccgcgccaacggcctgcgctttggcgtgatagaaggtgccgagatcgcgcagtggttggtaaaactcaggagccagaatcagcaccagaaaaccggcaaacagggtgacgcccaatccgtagctgccaaaattcaattcgccaagataggaaaaaccgaaataaaccgcgacaacggcaatagaaatagcggcgaaaaattcgagaaccgccgaggaaaggaaggccatgcgcagcacttccatggtccggctgcggaaatcttcggaagaatcacggatttggtcggtttcggccttcgcccgatgaaataagcgcaaggtgtccaaaccgcgcaagcgatcgaggaaattgccgctcaatcgcgccagtgcaacaaagttgcggcggttagcatctgctgcgcccatgccgactagcgccatgaaaatcgggatcagcggagcggtgacgaacaaaatgagtcctgcggcccagttaatcgggaaaatcgcaatcaaaatcaacagcggaatcagaccggccagatacatttgtggtaaatagcgcgaatagtaatcctgcatttcctcaatttgttcaagaataatggtcgcccaactgccggctggtttgccttttacccaggatggcccgagttgttcaaggcgatccagcacgattttacgaatctgcaatcgcaccttcatgccgcagataaaacctacccgctcccgtagccaactgaccacggcgcgcgctgcgaaagttccagccagcagcaagaagtcgttggtcagagcctctcgcggcatctgatccataatcagcgcctgcaataatccggctaataaccaggcttgagcgatgatcaataacccgctgagcaaaccaagtagcatggaaaggcggagccaacgttgcgcgggggcgctttgttttttcagccaacgaatcaactcatattgtcttgttttattcatcaggcaattattctgcgcaggaaatgggatgataaatttatcaatagatgtctgctccccgaagagggcaaaccggcgaaaggcaatgttaccttgtccctacgccttgtgaaaacaaataagggggaaatagtggttttaaacaagtttaagaaaaatacaggaagaggttattttgatttacctcattgattgtaaatcaaaaagtagaaatgattcgttttttggtttttatttcatcgattattactgaaaccaaccaatcacaattaaataacaagtgattgacatggggagtggcgagttaaataggttttttgcactgttattttatattgttgccaactgtatctttactttttaattaaacggattgcaggtaatccatgaggcttggccgttttgaacgcacgaacaactcggcggagatataaataaagtgaagccacgaataaaaaggcgactcatcttgcgattgagccgcctgtttcttcgagctagcctgagtcgttcttcaggccgggtcgattacttatcgttgaccaagccgtccagataacgctccgcgtctaacgcagccatacagccggtgcccgcggaggtaatcgcctgacgataaatatgatccatgacgtcgccggcggcaaatacgccaggtacggaagtctgggtcgcgttgccctgaatgccagactgcactttgatgtagccgttttcccgttccaactgatcgccgaaaattgcggtgtttgggctgtggccgatggcgataaatacgccagcaactgccagttcttcggtttcatcggtttgggttgaacgcaaacgcacgccggtaacgcccatttgatcgcccaacacttcatccaaagtgcggtcggtgtgcaacacgatattgccgttcttcactttttccatcagacggtcgatcaggattttttccgaacggaaagtatcacggcggtgaattagatgtacttcttccgcaatgtttgccagatataacgcttcttcaaccgcagtgttaccgccgccgactaccgcgactttctggccacgatagaagaaaccgtcgcaggttgcgcaagcggaaacgcctttgcctttaaaggcttcttcagattccatccccagataacgggccgatgcccctgtggcgatgatcagagcatcacaggtatattcttcgctatcgccgaatagacggaacggacgctgttgcagatcgactttattgatatggtcgaaaagaatttcggtttggaatttcgctgcgtgttcgtgcatacgttccatcagcgccgggccggttagaccttctgggtcaccgggccagttttcaacttcggtggtggttgtcagctggccgcctttttccatcccggtaatcaaaacgggcttcagattggcgcgggcggcataaactgccgcggtgtaacccgcaggacctgaaccaagaataattaatttgctgtgcttagccgtgctcatgaatacctctttcccacaatggcggacaatgttagggattgtagggaaaatgtgacagtaaaaaaagcgaacaaaaatgttgttagcgatttgtttgataggtgatgactattttctcagcgaaatgcattaagaataagcagttaggagagaaacctatcggatggggcttttttaatcgcggctacatttgctctcggacatggctgtccgcaagtggttggccttaaccctacgaattttgtgccctcatctgtcacttccacccgaattcagcggaattttctctctgaacatgaggtaaaaaaagcgtaaaaacgaggggaaaatgagcgagtgagattttttatctggcacgttctactgatttaacttcttttactttgacaatcggctgtgcatttgcgaaaacatcataggaagaagaaattatctgcgcgccataatttcagaattggtatcactgatatcaatcgaaaaccctggaacgttttcgattaatgctgggtggctacgtgcagtgatttctcggtatcgttggaaaacatcccattcggcaccgcgatgttttcatctctttcgggacgctaataatcatcgagtacctcgcatgcggttggacagacagggtgtgagataggaacatgttgatatatttgcacaaaaacaggctgtgggtctttgtctgtggcaggctcagaacaccgacttccggttagggcatgtggcggattcaaggaaattaagagagacaataagatgatagacaataagaaacgcccggggaaggagcttgaccgtattgaccgtaacatcctgaatgagcttcagaaggatggtcggatctcaaacgtagagctttcaaaacgtgtaggtttatcgcctacgccgtgtctggaacgtgttcgccgcttagagcgccaggatttcattcagggctacactgcgctgttaaatccgcaatatctggacgctgcactgttggttgttgttgagattactctgaatcgtggtgcgccagatgtgtttgaacaatttaacaccgcagtgcaaaaacttgatgaaattcaagagtgtcacttggtttccggcgattttgactatttgctgaaaacccgcgtgccagacatgtctgcctaccgtaaattgcttggtgaaaccttgctgcgtctgccgggagtgaacgacacccgtacttacgtagttatggaagaagtaaaacagagcaatcgtcttgtgatcaagacgcgctaaacgggcaggtgcaaaacctgagtaatttggttacactcctgtttattcatacagtttcagcgccgggaaggtttctcggcgttgtttctattaccaattcacaggacctggagagcctttcttgagccaggaatatacagaagataaagaagttaccctgaagaaactcagcaacgggcgtcgtttacttgaagccgtactgattgtggtaactattttggcagcgtacctgatggccgcgctgatcagtttcaacccttccgatccaagctggtcacagaccgcatggcatgaacctattcataatctgggtggcagcgttggcgcctggatggccgatacgttgttcttcacctttggtgtgctggcttacgccattccgccgatcatggtgatgttgtgctgggccgcattccgccagcgtgatgacagcgatcatatcgactatttcagcctctctctcaaactgatcggcacgctggcgctgattttgacatcctgcgggctggctgcgctgaatgtcgatgatttgtactactttgcttccggcggtgtgattggcagcctgttcagtaacgcgatgctgccgtggttcaacggcgtgggcgcgacgctgacgctgctgtgtatctgggcggtaggcttaaccctgtttaccggctggtcatggctagttattgccgaaaaaatcggtggggtagtgctgggttctttggcctttctgaccaaccgttcccgcagatctgagcgtcaaagagatgaagatgacgattatctggatgccgaaattgccgatgaacccgacgctcaacccggcgtagccgcatcggtcgttgctgcgacaacagccaacgcgagtgatgacgttgatgatgtcctgttctcggcaccatcgctgactaaaatcccaacggaaagtcctggtgaaaatgccgctgttgctccggttatccctgatgctgcgccacagacggcagcagcgccttatgatgatccgcttctgagcacgatgagggcaacagacgttgatgagacacagactcagcatcagccgtgggcttcgacagaaacggcgccggctgaaactgcgtcagcgcaaaatgttagccacagcgcatcgccaatgaccgagaatctggcgacaccgccgctatattccttcgaaattcctgaagaaacaccggcaccgatccgcccaaccgccgagcctgagaaacgtgagccgcaaatgggcacatgggatgccgatccgcagccgtcgccgtttgattttaccgccgctcagcgccacagcgatcgcgtggaatcaacgccttatatgaatcctggtttcggtgacgagtcgggcgctgaaagctcaccttcggctgtcaccggctctattcctgcagtgggtcatggggtgtccacggccgccgcggcaacctttatgccagcgtttaccgctataagtgacagtaactcccagattaaacagggtattggccctgagttgcctcgtcctaaccctgtgcgtattcctacccgtcgtgaaatggcttcttatggtatcaagttgccgtcacagcgcatggcagagcaggagcaacgcgctcgtcagggcgatgagcctcagcctagcgcgccgcaaagtgtggaagcgcagcacgacgaagatgcgttgcaacaggccatgctgcgtaaagctttcgccgatcgggaaaaccagcgctacggtgaaaattatgccgcagagccagagccgcagatcgaaccggaagatgaacaagcgttgcaggacgcggagctgcgtcaggcctttgctgctcaacagcaaagtcgttacgggatatcttctgaatctgagccagtcgtggtgccaagtcgcccggttgatacgcataatgcattcaccttctcgccggttgcggatttggtcgacgatacgccgcgcgaaccgctgtttacgctgtcaccttataccgaagagcccacgcagccggaaccgcagtatcaggctgaacctccagtgcagcagccagccgcacccgtctatcagcagccggtggctcctcagcctgcggcaccagcggagtcggcctattcgacagcccagaatgcgccgacttatccgacggctgctccgcaggcaccggccgcacctcaaccggtaccgcagcctgttcctgctatggacagcctgattcatccgttcctgatgcgtaacgatcagccgctgcaaaaaccaacgacaccactgccgacgctggatctgctggcttctccgccagaagaggaagaaccggtggatatgtttgccttggagcaaactgcgcgtttggttgaagcgcgtcttggagattatcgggtcaaagccgaagtggtgggaatatcgccggggccggtgattacccgcttcgagctggatttggctccaggggtgaaagcttcacgtatttctaacctgtcgcgcgatttggcgcgttctctctctgccattgcggtgcgcgtggtggaagtgattccaggtaagccttatgtcgggttggagttaccgaataaacgtcgccagaccgtctatctacgagaagtgctggactgcgctaaattccgtgataacacttcgccgctggctattgtgctgggtaaagacattgccgggcagccggtggtggcggatctgggcaaaatgccacacttactggttgcgggtacgacgggttccggtaaatcggtcggtgttaacgccatgatcctgagtatcttgtataaagcgactccggatgaagttcgtttcatcatgatcgacccgaaaatgctggaactgtcagtgtatgaaggtattcctcatttgttgaccgaagtggttaccgatatgaaggatgccgctaatgcgctgcgctggtgtgtgggcgaaatggaacgacgttataagctgatgtccgcgcttggcgtgcgtaatttagcgggttataacgaacgcgtggcgcaggctgaagctatggggcgtccgattcccgatccgttctggaaaccaggcgacggcatggatatcgaaccgccaatgctggtgaaactgccatacatcgtggtgatggtagatgaatttgccgatttgatgatgaccgtcggtaagaaagtggaagagctgattgcccgtttggcgcagaaagcgcgtgccgcaggtattcatctggtgctggcgactcagcgtccatcggtggatgtgatcaccggcttgattaaagctaacataccgactcggattgcctttaccgtgtccagcaagatcgattcccgtaccattctcgatcagggcggtgcagaatcgttgttgggcatgggtgatatgctgtatatggcgccaaactcatcgataccggtgcgagtgcacggtgcctttgtacgcgatcaggaagtgcatgcggtggttaacgactggaaggctcgcgggcgtccgcagtacatcgaaagcatccttaacggcagtgatgacagcgaaggcggtagtttagggctggatagcgatgaagaactggatccgctgttcgatcaggctgtcagctttgtgttggaaaaacgccgagcctctatttccggggttcaacgccagttccgcattggttataaccgagctgcccgtattatcgaacagatggaagcccagcaaatcgttagtccgcaaggccataacggtaaccgtgaggtgttagctccaccgcctcatgaataatcgttatcaatgatcggatcatgacgtataaaagggccgcattgcggcccttgagctaaaagataaagcgcgtttaaattgataattaaagcttttcagcggtcgttctaaggtttcaggctacgaccagaaagattggtaacattgacgcacaatcattcttttagtgaatgctgtgcaaagaagcgtaaaccatgctgtttatcagattattgtgctatagctgaataataggcttcggctagagtgcagatagttaattattgaataggtccctatggcaatatttgccggggtaatagcatttacaaggtatttggaatcatgaaaaagctgctcgttgcctgctgtttgctctccagtgttatttccgcctccgctttggccgatgcaagccaggatcttcaaggccgcctgagcaaagtgaacagtttccacgctaagttctcgcagtacgtgaccagcgctgacggcgcggcggtacaagaaggtgaaggcgacctgtgggtaaaacgcccaaatctgttcaactggcatatgacttcgccagacgaaagcgtgcttatctctgacggcgaaacgctgtggttctataatccttttgttgaacaggcgacggcaacctggttgaaaaactcaaccggcaacacaccgtttatgctgattacccgcaataatccggatgactggaaacagtacaatgtgaaacagaaaggcgatgattttgagctgacgccaaaagcgccgagcggtaatctgaaacagttcgccatcagcgtgacgccaggcggcacgatcaaaggctttaccgccgtcgaacaagacggccagcgcagcgcctatgtgctgaaaggccagcaaaacagcacgttcgatgccagcaaattcaagtttaccccgccgaagggggttacgctggacgaccagcgccagtgaggtgtgagtgagtaatctatccctcgatttttctcaaaacgagtttcagccattggccgcgcgtatgcggcctttaacgttggctgaatatatcggacagcagcatttattagctccgggtaaaccattgccacgtgcgattgaagcagggcaactgcattcgatgatcctatgggggccgccgggaaccggtaaaaccacgttagctgaaattattggccgctatgggcaggcagatgtggagcgtatctctgccgtgacctccgggatcaaagagatccgcgaagcgatcgagcgggcgcgtcaaaaccgtgatgctgggcggcggactattctgtttgttgatgaagtacatcgcttcaacaaaagccagcaggatgcgtttttgcctcatattgaagacggtactattacttttatcggtgccaccaccgaaaatccctctttcgaactcaattcggctttgctttctcgagcccgggtctatttgctgaaagcgctgacagcggcagatatcgagaaagtgatcgatcaggcgatgtctgatagtacccgcggtttgggcggtcagaatatcaagttactggatgaaacccgccgcatgatgtcggagttggtgggaggagacgctcgccgggcgctaaatagcctggaaatgatggcggatatggctgaaattgatgccaaaggtgtgcgagtactgactcctgaattattgaaagaagtttcgggggagcgtagcgctcgctttgataacaaaggcgaccgctattacgatctgatttcggcgctgcataagtcggtacgaggctcggcgccggatgccgcgctgtattggtacgcccgtattattaccgccggtggcgatccgctatatgtagcccggcgtttgttagccattgcttcggaagacgtcggcaatgccgatcctcgcgcgatgcaagtcgctatttctgcctgggattgcttcacccgcgtcggcccggcagaaggtgaaagagccatcgcccaagccattgtttatcttgcctgtgcgcccaagagtaatgcggtttataccgctttcaaagcggcgatgcgtgatgcacgtgaaatgcctgattttgatgtgccagaacatctgcggaacgcaccaaccaaattaatgaaggaaatggggctgggcgcggagtatcgttatgctcatgacgaacaaaatgcctacgcggccggtgagaactatttcccgccggaaatggcggcaacccgctactattcgccgacttcacgcggtcttgaaggtaaaataggtgaaaagctggcatggttggctgagcaggatcaaaatagcccgataaaacgctaccgctagccttgtcgttgcggtaaggttatctttataactacttggtaagcggagaatacttcgcttacgtcagtaagatttcttctaacaaccctttatttttttaactacaagcacaggactagcatgctcgatcccaatatgctgcgcaatgagctagacgcagtcgcagaaaaacttgctcgcagaggttttaaacttgatgttgatacgttgcgcgcacaagaagcacgccgcaaagttttacagaccgaaacagaaaatctgcaggcagaacgtaactctcgatcgaaaatgatcggtgcggcaaaagctcgtggtgaagatatcgagccattacgtcttgaagttaatgcgttgggtgaccagctggatgccgctaaagcggaattggaaacgctgcaaaacgaaattcgcgatttggcgctttctattcctaacctgccggatgattctgtgccagtcggtaaagatgagaacgacaatctggaagtgagccgttggggcgaaccgcgccagtatgattttgacgttcgcgatcacgttgctctaggtgaaatggctggcggtctggattttgctgctgcggttaagctgaccggcgcgcgttttgtggtgatgaaagggcaaattgcccgtatgcatcgcgcattagcgcagttcatgctggatctgcacactgaaaagcacggctatctggaaacttacgttccgtatctggttaaccacgccacgctttacggcactggccaattacctaaatttggtggcgatctgttccacaccaaaccgctggaagaagagtctgacagcagcaactacgcgctgattccaacggcagaagtgccagtaaccaacctggtacgcgacgagattctggaagaagaatccctgccactgaaaatgactgcccatacgccgtgtttccgttcagaagccggttcttatggtcgggatacccgtggtctgattcgtatgcatcagttcgataaagtcgaaatggtacagatcactcgtccagaagattccatggatgcgctggaagaactgaccggccacgcggagaaagtactgcaattgctgggtctgccttatcgtaaaatgttgctgtgcaccggcgacatgggcttcggttcaagcaaaacctacgatctggaagtgtggctgcccgcgcagaacacttaccgcgaaatctcctcatgttccaatatgtgggatttccaggcgcgtcgtatgcaagcgcgctgccgtaacaaagttgaccgtaaaccacgtctggttcataccctgaatggttctggtctggctgttggccgtactttagtcgcggtactggaaaactatcagcaagcggatggtcgtattcaggttcccgaagtattacgtccgtacatgggcggcttggaatacattggcggctaagccatagatttcagctgttgatgttcaaagcctcgcattgcggggctttttaatggcctaaatttgggcgtttatttcggaatatctcctgagatgggggaagttcctgaaagtaaaagtggagaaactcaacattttgtttgcaggcttattgtttgatgagatagcataaaaaccacgctggtagcatatcgtgctattaccactgtcagagcaattgacttttttatcaccagtggcatgatgcgctcactttccatcgcgccaacggtcctcgtttcactatgtccgcatactctcgcccagtgctattgttgctctgtgggcttttgctatttacagtttcaatcgcggtattaaatacattagttcccctgtggcttagccaccagcatttgccagtgtggcaagtgggtatggtaagttcttcatatttcagcggtaatcttgcgggaaccttgatcgctggccgacttattcagcgtttgggctttaatcgcagctatcactactcttgcctgttatttgcggcggcgacctgcgggctgatgctgtcagtcgatttctggagctggttgggctggcgttttatggccggtgtagcctgcgcgttgatttgggtaattgtagaaagcgcattgttacgcagcggcacgccaactaatcgtggacagctattggcggcgtatatgacgatatattatctgggcaccgtgggtggccaactgctcttgggcatggtctctacccagttggccagcgtgattccttgggtgagcgcgttggtgattactgcgatgttgccacttctatttgctcacttcgctaatcagtcggctgaaaccacccatgtgaaggtttggccgatgtttaagcgtcgtagcgctcgcttgggtatcaatggctgtattatctcaggtatcgtgctgggatcgctctacgggctaatgccgctgtatttatcccatcaggggatgagcgatgccaacgtcggatggtggatggcgctgctggtcagttcggggatcttcggacaatggccggtagggcgcatggccgatcgctatggtcgcctgctggtgctgcgtattcaggtatttgtcgtgatattgggctgtatcgcgatgctcagtaactatgcgatggcgccagcgctatttattctgggggcggcaggttttacgctctatccagtcgctatggcctgggcctgtgaaaaagccagttccgatgagttagtggcgatgaatcaggctttattgatgagttacaccatcggcagtctggctgggccgaccatgacatcaatgctgatgcagaatttttctgataatttattattcgtgatgattgcgggagtggcattggtgtatctgatgatgctgctgaagaaaccggatcagcaacacacgccttttgcggcggtgtaacgctctctgccagccggttgcgaaatcccggctggcagaataaacggtaagtcagtaaatcactttgtgaccgtaactttccaggatacctttcactcgatccataatttctttggatggtggcttaacgccgtccagcttatattcttcgcccatggctacccatttatgcttgcctaactcatggtaaggtagcaattcgattttctcgatgttagtcatattttgggtaaactcacctaacatatgggcggatttatcgtcatctgaccaacccggaaccacaacgtagcgaatccaggttttctggttgcgtttcgccagataacgagcgaattccagagtacgatggttagacacgccgaccagattttgatgaatggaatcatccatttgtttcagatccaacatcaccaaatcggtttcatccagcaattcatcaatcaccggatcgtaacggcgaacaaatccgttggtatccagacaggtatgaatgccttctttatgacaagcgcggaaccagtcacgcacaaattcagcctgtaaaatggcttcgccgccggatgcggtcacgccgccgccggatgcgttcataaagtgtcggtaggtcacggcttctttgaccagctcttcaaccgtcacttccttaccgccgtgggtatcccaagtgtcgcggttgtgacagtacaggcaacgcatcaaacagccttgaaagaaaacgataaagcggatgccgggaccatcaacggtgccacaggattcaaatgagtgaatgcgaccaagtacagacattgcagggggttctccaaattgaccgttcaatagcagtcgaaatcaacataacggcggcagggcaggaggaaggggatgcccttgttagctcggtgattcgggcgatcacaacgtctgagctggcactcctgctgccgacgctaggtcggataaaactgttttgccgggcacccactcagggtagatggctggcaaaacagacttttctggcaagtacatcgtgcggtggttggtgaaaatagctgtgcttgataagtaaaggccccacagtcgtggagcctttaagtttatacccttcggacttgaagcaacagggttgttagcggatacacgagcctaaatcagcgacttaagtcagttcatcgggctttgttttcttgctacctgtccgtcactccaaattctttgcgtatcgggttattaaatcgactgagtgaaagtacgagtaataacatcctgttgctgttctttggtcagcgcgttgaagcgtactgcgtaacccgatacacggatggtcagctgcggatatttttccggattttccatcgcgtctaacagcatttcacggttcatcacgttcacgttcaggtgttgaccaccttcgatggacgcttcgtgatggaagtaaccgtccatcagacccgctaagttagctttacgcacttcgtcatctttacccaaagcgtttggtacgatggagaaggtataagaaataccatctttcgcataggcaaacggcagtttggcaacggaagtcagagaggcaacagcacctttctggtcacgaccgtgcattgggttagcacctggaccgaatggggcacccgcgcgacgaccgtctggggtgttaccggttttcttaccataaaccacgttagaggtaatggtcagaactgactgagttggtaccgcgttacggtaggtacgcagcttctgaattttcttcatgaagcgctcaaccaggtcacaggcgatgtcatcaacgcgagaatcgttgttaccgaactgtggatattcgccttcgatgttgaagtcgactgccagaccatcttcatcacgaatagtcgttactttcgcgtatttgatagcagacagggagtcagcagcaacggacagacctgcgataccgcaagccatggtgcgatatacatcacggtcatgcagagccatcagcgcagcttcgtagctgtacttgtcatgcatgtagtgaatgatgttcagcgaagtcacgtattgtttagccagccaatccatgaagtggtccatgcgttccatgactttgtcatagtccagcacttcgtccatcattggcgcttctttcgggcctacctgaattttcagtttttcgtcaacgccgccgttgattgcgtacaacatggttttcgccaggttggcacgagcgccgaagaactgcatttgtttaccgacgatcattgggctgacgcaacatgcaatggcatagtcatcgttgttgaagtcaggacgcatcaaatcatcgttttcatactgtacagatgaggtgtcgatagaaactttcgctgcgaacttcttgaagttcaacggcagtttctcagaccacagaatggtcatgttcggctctggagatggccccatggtgtacagggtattcaggaagcggaagctggttttagttaccagagtacgaccgtcaacgcccataccagccagagactcagttgcccagattgggtcaccggagaacagctcatcgtattcaggggtacgcaggaagcgaaccatacgcagtttcatcaccagatggtcaatcaactcttgcgcttcgatttcggtcagtttgccggctttcatgtcgcgttcaatgtacacgtccaggaaagtagacacgcggccgaaggacatcgctgcaccgttctgggatttcaccgcggccaggtagccgaagtaagtccactgtaccgcttcacgggcgttagtcgcaggacgagaaatatcgcagccgtatttagctgccatttctttgatttgacccagtgcacgatgctgttcagcaatttcttcgcgcagttggatggtcatttccagatcttcgccgttttccagacgtgactgtaatgaattgaactgagccagtttgtctttcatcaggaagtcgataccgtaaacggctacgcgacgatagtcaccgatgatacgaccacgaccataagcatccggcagaccggtcaggataccggatttacggcagttcaggatgtctttggtgtaaacatcgaatacgccctggttatgggttttgcggtattcggtgaacacttttttcagctgtggatccagctcacgaccgtaaactttgcaggagttttcaaccattttgatgccgccgaatggaatcagggcgcgtttcaatggtgcttcagtctgcaaaccaacgatggtttccaaatctttgctaatgtaaccagcgtcgtgggagatgatggttgatgctacgtcggtatcgaagtcaactggcgcatgagtgcggttttccagtttgatgccttccatgaccttggcccacagctcatcggttgctttggtagagccggccaggaaggattcgtcaccttcatatggggtgtagttcttctggatgaagtcacgaacgtttacttcgttctgccagtcaccctcggtaaaaccttgccatgcgttggccaatttttcattaagttcggtcataatgcatctaccttttaatgtgaatttcttcgaaaaccagacgtagcggccacactttaatgttgctggtcaccgcgcagataaattacccaataagttaaccctaccaataacccgccaccaatgatgttaccgatggtaacaggaatgaggttgtcgataacaaagttacttacggtcagattagcaaattgctcaggtgttgctcctatggcttgccagaactcaggcgaagcgaagtttttaatcactatgcccataggaatcataaacatgttggcgatgctatgttcaaagccgctggcgacaaacataccgactggcagaatcatcgcgaacattttgtccataatggtacggccggagtaactcatccataccgctaagcacaccatcaggttagctaaaatgcccaaacatactgcttgaataaaagtatggtgcaatttgtgatctgcggtttgcagcacattcaagccccattggccgttggcaaccatgtattgaccggcaaaccagatcagggcgacaaaaaacagcgctccggccaggtttccaacgtaaacattcacccagttagtccccaactgacgccaggtaatccggccgctggctttcgctacggtggttaatacggtggaagtaaagaggtcgccgccgcataccacgactaacatcaaacccagtgagaagcagataccgccaactaatttcgcaaagccgaaaggaacgcccgcggtgccagtagtagctgtaatgtaaaatacaaaagcgattgagataaacacgcccgcagtaattgccagatagaaagttttcatcggatgcttggtggctttgtagacaccggcatcttcggctactttcgccatggccgcaggtagtaatgcatcgaaggggttgtcagctttcacactaactctctctttagggttaataaagcacaacgagatactagcaaagcagtatagcgtgaaaattgacgtggatcatattgggccactttaatcagccataaacacctgcaatctcaatggttaatcatgttatttcattgatatttaaagagaaaaaatattttaagatttacaaaaaattttgattaaacgttcaattcgatgaagaaaaggttaataaatagcgtaatttgtagattatcgccttcaaccacgctattaaaaattaactatttatttacctgcccataagaatgcgagctttaggcggaattatttgtctaaaagtgccattttctcccaaaaataataactgttttttgatgaaaaaataattctggcgatgggaatttctgcataaataataattcaggcgctgagatgtctatttattaagcgcacagtttatataactcggtgctttatataactcggcgcttatagaacatacagcgataaaaatgaggatagataaatgtagggtaaaaaaacggcgaacccataggattcgccgtcgcttgatgagatagcagttttcagaactggaacaaagctattagttttttgcccagtaacgacgcttggccgcttgcaacttctcataggctcccaacagcgcctgatgtgccggtaatgctttcaaatcaggatcgatgctaaacagcccgtggaagcgaacttcgccacaaagggcggcagaagcggcatccacagcatcttgaccgtacattttcatgaatgcgccatgatattgggcaggatcgcgatccggctcttgagtcagcagcagcaaggtttgcaggcaacggtaatagttagcctgttcaggagtaaatacggaggcgttgaaatcctgcgtccactcaacccaaatcaacgcttgctccaaatcaccaccggctagcgccagcatggatttcagctcgccaacgcgcagggtataccagccgttgtctttcccagaggcgatgcccagcagttcacgaacgcgggcaaaatcatccagaccttcgtcgtccagctgttcgatcaattgcagatactgctctggcttccactcggtgcctggcaacgccagcagagtgtcacgcagatgtacgcccatagtgttattggccatcagcaaatcttctgccggatagatgtcggacatacccggtaccagaatacggcaggcgtaaacgcccaaatgctcataatctgcaatgtaaacttcagcatcttcctgtttgaagatcgccatcagcgtagcgaattcttcttcggttgtgccgctgaaattccagtcaacgaacggatagtctgcgtcctgcttgaacatatcccagctaattaaaccgctggaatcgataaagtgagtttccagattggtgtgttcggccacttcttcgtcatcgaaggttggagcggtgaaaacatccaaatctttcaggctgcggccttgcaacaattcggtcacggtgcgctccagcgctacgccgaagtcaggatgcgcgccgaatgaagcaaaacaagttccgttagaagggttgaataagacgacgcaaataaccgggtaagcgccgcccaaagaggcgtcataagaaaggattgggaaaccttcctcttccagttttgcaatggcttcaactacgccagggtagcggttcagcacctcttgcgggatttcgggcaggctgatggattccgcaataatgcggtttttcacatagcgttcgaaaacttctgacaaaccttggacacgtgcttcattggcggtattaccagcagacataccattagacacataaagatttcctatgatattcataggaatatatactgtctccaggtcagattgacgggtaaagggcagggaacagattccgcgctcaacgttacctgactgtaagtccaccagatcattggcatttagctctttgtctgggtcataaaaagcgtgcagccgggcatcgagaatgccttgtggcagggagccatcagccggaatagggaaccacttctcattgggataatgaacgaactcaccgttggcgatttctttacccaaataaaaatcagcgaagaaatagttagttgataaacgctcaaaatattcacccagagcggaggccagtgcggcctttttgctcgcgcctttgccgttggtaaaacacagcggacagtcgcgatcgcggatatgcactgaccaaacatgaggaaccggattgagccaggaagcttcttcaatattaaaaccgagatcgctcagtttttgctgaaaacgggaaatggagtcttccagcgcagcgtctttgccggggataaaagtttgcgtcatgtttttcactttttgaccgtactaaaaacgcgcaatcatacggggttttggccgatagctccatgtattcctaaagcacaatatatgtcacagtatttgtgtggatttaccggataattcattcatttataaaaaagggagttggcaagatgaagtctttaaaattaaccgttttggcagggattttggcagggattagtggttcggccttggctatgccgaatattacgctgttagcgaccggcggcaccattgctggcggcggcgattcagccaccaaatccaactacaccgcggggaaaattggtgtggatgccttggttaatgcagttccggaaatcaaaaacattgccaacgtacacggcgagcaattggtcaatatcggttcccaagacatgaatgacgatgtctggttgaaactggctaagagaatcaatgcagactgtgcaaaaaccgatggttttgtgattactcacggtaccgatactctggaagaaacggcttacttcctcgatttgacggtaaaatgcgataaacctgtggttgtggttggcgcaatgcgcccagctacagcaatgggcgctgatggcccactgaatctttataatgcagtggttgttgccagtgatccgcagtcagccaagcgcggcgtcttggtggcaatgaacgatgtggtattggatggccgcgatgtgaccaagaccagcaccacttcagtacagaccttccagtcaccaaacaccggtaccgtcggcttgatccatgacggtaaagtgaattatctgcacgcaagcgaacacaaacaaactccgtttgacgtcaccaaactgacgaccttgccgaaagttggcatcgtttatagctatgcaaacgcgtccgatcttccagccaaagcctttatcgccgatggttatcagggcatcgtcagcgccggtgtgggtaatggcaacatgtaccacagcgtcttcgacactctggcaactgcggcacacaatggcgtcgccgtggtgcgttcttctcgcgtaccaaccggttctaccacgcaggatgctgaagttgacgataccaagtacggttttgtggcttctggcctgttgaatccgcaaaaagctcgcgtattgctgcaattagccttaacgcagaccaaaaatccgcaggaaattcaaaaaatgttcctgacttactaagtcgttcattttattaattcgggggcggctcgctgcccctttttaccccgaatcctttttcgcaccaaaacccgccgctaacgcgcacctgacgtcattcaagctcaaattgagttatctatcgcgtagtgagtcgcatagtcattaactttcagcgaataattctgcatgaaatgccaataggcgggcgaaccgctataaaacgccgggacgctttcgaccttctggatgaataagcgttgcagccgttgaatgcgaatgataaaaccgatgtatgggttaaaacgatgattatctcagtgaaagcggtgaggggaaatgacacaggtttacaattttagcgctggcccagcaatgctgccggtggaagttctgcgtcgtgcacaacaagaattatgcaactggcatggcattggcacctcagtgatggaaatcagccatcgcagtaaagaattcattcaagtggccgagcaatccgaacaggatctgcgggatctgttgaaaattcctgataattataaagtgctgttttgccacggcggagccagagcgcaatttgccgcagtgccgcagaatctgctgggtgataaaacctcggcagattacatcgatggcggctattgggcacacagcgccattaatgaagctcagaaatattgcgagccaaatgttattgatattaaagcacaaattgatggtctgaccggcgttctgcctatgagccaatggcagttaagcgcggatgcagcctatgtgcattattgcccgaacgaaaccatcgacggcgtggcgatccatgaagatcccgattttggcgataaaatcgtggtggccgattattcctcatcgattctttcccgtcctattgatatcagccgctatggcctgatttacgctggcgcacagaagaatatcgggcctgcgggtttgacgttggtgattgttcgtgaagacctgctgggcaaagcgcacaaacatgtgccgtctattttggattatcaggtattggcgaagaatgactcgatgttcaacacgccgccaaccttcgcctggtatctttccggcatggtctttaagtggttgaaagagcagggcggtctggtggaaatggaaaaacgtaaccgcgccaaagccgaattactttatagtgctattgatagcagcgatttttatcgcaatcaggtggccacggccaaccgttcctggatgaatattccgttccaactggctaaaccggaactggataacgttttcctcagtgaagccgaagcgttgggcctgcaagcgttgaaaggccatcgggttgcaggcggtatgcgggcgtccatttataacgctatgccgattgaaggcgttaaagtattaactgattttatggttgactttgaacgtcgccatgcctgatagcgtttcagggatttcctgctttatcggcagttattttcccaatgtatttagcggtatgtgccgccattttttgcctcaaaacagccccgttcatgcggggttgttgattaatagaagactggagagtgtttttcccatgctggaatccctgacgttacaacccatcgcgctgattgacggcaccgttaatcttcccggctccaaaagtgtgtctaatcgcgccctgctgctggcggcactggctgaggggacaacccggctaaacaatctgttagatagcgatgatattcgccatatgctgaatgccctgaaaacgttgggcgttaattatcgtctttccgccgatcgcacccaatgtgagattgacgggctggggagcccgctgttggccgctgagccggtagagttattcctcggtaacgcaggcaccgcaatgcgcccattggctgctgctttgtgcctgagccacggcgacgtgatattaaccggcgagccacgtatgaaagaacgcccaataggccatttggtggacgcattgcgtcagggcggcgcgcagattgattatctggaacaggaaaattatccgccgctgcgtattcgcggtggtttccgcggcggcgagctgaccgttgacggcagcgtatccagccagttcctgacggcgctgttgatggcagcacctttggctgcgcaggatacgcaaattcgtattcaaggcgatttggtttccaaaccttatatcgatattactttgcatttgatgcaaagctttggcgttgaagtgacgcacgaaaactatcagatcttctatattgcgggcggccaaacttatcgttcgccgggtgaatatctggtagaaggcgatgcgtcctccgcctcttacttcctcgctgcggcagcgatcaaaggtggcactgtacgtgtgaccggaatcggtaagaaaagcgtgcagggcgataccaaatttgctgacgtattggaaaaaatgggtgcaatcatccgttggggtgatgattatatcgaatgtagccgaggggagttacgaggcatcgatatggacatgaaccatattcccgatgcggcgatgaccattgctaccaccgcgctgtttgccgaagggccaacaatcattcgcaatatttataactggcgggtaaaagaaaccgatcgtctggcagccatggccaccgaactgcgtaaagttggagcagaagtggaagaaggccacgactatattcgcgtgcttccacctgcgcagctgatcgcggcagagatcggcacttataacgatcatcgtatggcgatgtgtttctcgctggtggcgttatcggatacgccggtcactattctcgatccgaaatgtaccgcaaaaaccttccctgactatttcgaacagttggctcgcttaagccaaaccgcatgattctgctggtttaagcatggtttgtattaaagtatgcttcttattaataaatgggcgggataaccttcccatttatacaaattgaaaatatgttcagcaaaacacatcaattttccctaaacttattcaacgtggtgtggttttattttcagcaactacacctcgcagggtaacagttctcgcagatgcggcgtataatgtcgcacctgtgtttacccgatggggtagacaagaggttttgcctaccgaaaggagagagaaatgacggcgatagccccggtgataaccgttgatggaccgagtggtgcaggcaaaggcacgctgtgtaaagcactggctgaaacgctgaaatggcgtttactggattcaggtgcaatctaccgcgttttagccttggctgcgttgcatcatcaggtcgatatcagcaccgaagaggcactggttccacttgccgcccatctcgacgtccgttttgtcgcagaaaacggagaattacgcgttattcttgaaggtgaggatgtcagcaatgctatccgcactgaaacagtgggtaataccgcctctcaggcagccgctttcccgcgtgttcgtgaggcgctgttgcgccgtcagcgggcatttcgcgaagcgccgggtctgattgccgacggcagagatatgggaaccgtagtgtttcccgatgcgccagtgaagatatttcttgatgccagttcggaagaacgagcacacagacgcatgctacagttgcaggaaaagggctttaatgttaactttgaacgtcttttagccgagatacaggagcgagatgatcgcgatcgtaatcggtctatagcgcctttagtacccgcagccgatgcgttaatactggattcaaccagtatgtccatcgagcaggtgattgaacaagcgctggcgtatgcccaaaaagttttagcgttgccgtcgtgttaataacgtcagcgtagcaagaaccgagctcttaataacttgttattaaagggcaaattaaccttactgccaaggatggacggcgaggcatgtgaaacaaccccattaggcaggatgcccgatggacgttaaacttaagaatcctgaagattattaacatgacagaatcttttgctcaactctttgaagaatccctgaaaacaattgaaacacgtccgggctctatcgtccgtggtgttgttgtttctatcgataaagatatcgtactggttgacgccggtctgaaatccgaatccgcaattccagcagaacagttcaagaacgcgcaaggcgaactggaaattcaggttggcgacgaagttgacgttgcactggacgcagttgaagatggcttcggtgaaactcagctgtcccgtgagaaagctaagcgtcacgaagcatggctgactctggaaaaagctttcgaagttgctgcaactgtaatcggcgtgatcaacggtaaagtgaagggcggcttcacagtcgaactgaacggcatccgtgcgttcctgccaggttcactggttgacgtgcgtccagttcgcgatactctgcatctggaaggcaaagagcttgagttcaaagtcatcaagctggatcagaaacgcaacaacgtagttgtttctcgtcgtgccgttatcgaatcagaaaacagcgcagaacgcgatcaattgctggaaaacctgcaagaaggcatggaagttaaaggtatcgttaagaacctgactgactacggtgcattcgttgatctgggcggcgttgatggcttgctgcacattactgacatggcttggaaacgcgttaagcatccaagcgaaatcgtcaatgtgggcgacgaaatcactgttaaagtgctgaagttcgaccgcgaacgtactcgtgtatccctgggcttgaaacagctgggcgaagatccatgggttgctatcgctaaacgttacccagaaagcactaagctgactggtcgtgtaaccaacctgactgattacggctgcttcgtagaaatcgaagaaggcgttgaaggtctggtacacgtttctgaaatggattggaccaacaaaaacattcacccgtctaaagttgttaacgtaggcgacgtagtggaagttatggttctggacatcgatgaagaacgtcgtcgtatttctctgggcctgaaacagtgcaaatctaacccatggcagctgtttgcagaaactcacaacaaaaacgaccgcgttgaaggtaaaatcaagtctatcactgacttcggtatcttcatcggcttggacggcggcatcgacggcctggttcacctgtctgacatctcctggaacgttgcaggcgaagaagcagttcgtgaatacaagaaaggtgacgagatcgcagctgttgttctgcaagttgacgcagagcgcgagcgcatctccctgggcgtgaaacaactggcagaagacccgttcaataactacctgtctatgaacaagaaaggtgctattgttactggtaaagtaactgcagttgacgctaaaggtgctacagttgaattggcaggcggcgtagaaggttacctgcgtgcttctgaagcaactcgtgaccgcgttgaagatgcaacgctggtactgaacgtaggtgatgaagttgaagccaaatatactggcgttgaccgtaaaaaccgcgtaattagcctgtctgttcgtgcgaaagacgaagctgatgagaaagatgcaatcgctactgttaacagtaagccagaagaaagcaacttctctaacgctatggctgaagcgttcaaagctgcaaaaggcgagtaataacggggggcggtttctccgcccctatacggtagtttagctgcaaagcttggaggtaatatgaccaagtctgaacttattgaaagacttgctggccagcaatctcatgtaccggcgaaggccgttgaggatgcagtgaaagaaatgcttgaacatatggctggaacattagccgaaggtgagcgcattgagatccgcggatttggcagtttttctcttcactaccgtgctccgcgtgttggtcgtaatccgaaaactggcgataaagtagagttggaaggtaaatacgttccgcactttaagccgggtaaagaattacgtgatcgcgctaatatctacggttaagttgttcgcaaccagccgggttattgcttgtgaaaatatgaaacggtgcctttatggcgccgtttttctttttataatcatcgaattctgataaaaacctctttgccaaataacgcctttatttccagctcacttatcctgcactgaattaaaaactcgttttttaagttaatccttccccctgtattcactttcactctgagttaaaccaatcatccgctgttttcctcacgttatttctttctaactagtcactattttttgaagtttgtcgcaattccatttgggtatttgcaaccgctgaaactcgctttcgaggctcctcggaggatttagtcttgatgctggtaaagcacgctttaatactgaaaatacgcttagcggcaggatgctgtgaaaagaccaatagctaattatcaaaggatgattttttactgtgttatcaatcgatcgatgtgctggggcgttaattataggtttgctaccactgatgtttatcccacgcttaccgggtactgtgccagttttattattgctgtttaccgccattatcctgtggcttagcggttataaaaacgctcggtttgcggctttgccaatattgagctttttatggggaaactggcaggctgccggtctggtgaatcaaatagagtatatggttcagggagataagttgatcgttgctactgttgccagcatttctttaattagccatagggaggagagcgccagaatgctattgaaaatcgagcaggcagatggtcgtcgagtctttccaccggtttccgtttcggtccattggccaaaaaaatggcctgcatcctgttctggtcagcgctggcagctaaagatccgcatgaggccagtacacagcttgcttaatgaaggcggattcgatagccaacgttgggcaatggccaatcgacggcctctgaccgggcgaattatcactgggcggatgttggaggggaattgtcatttacggcaggacatcatctctagaacagatcggcaattgcagtcctatagtcagaggtccttgctattagcgctggcttttggcgagcggggggaattatcactacagcagtgggagactttgcgaaaaaccggcactgcgcatcttatggctatttcgggtctacatattgttatggcggcgttatttggccgtttattagcgagagcgattcaatatttatttccgacgcgctggataggccccttattgccattactttgcgggtggctgctcgcattaacctatgtttggctagcgggtgctaacccaccggcattgcgggcaggattggttttaacgctgtggttagctttacggctgtttggcgttctatccagcccttggcaggtttggctatgggcggtggcactgatactgcttagtgagcctttaacactgctatcagatagtttttggttatcctgtatggcagtactgagtttgctgttttggctgcactgggttccactactttccccatttctaacgaaaaatcgctatgcctggccactccgcctggcgcatttacaatttgggatgatgttgttactcatgccgttgcaaatgctcctatttcatggcattagcctatcctcgtttcccgcgaatttatgggcgatgccaatagtgtcatttatcaccgttcccttggtgttagtagcattggtattttcatttttctcctcatttgcggaagtcttctggtcgttggccaatagctcgctagagatcgctatgctgcctttaaacaacttaaaagcaggctggcagcacactggcgaaacggcgatggcgattggctgtctaggctggctgggcgtagtgatatggcgtttccggtggtggagtttatatcctttcgccgttattgctctctgcgtcaatttgattcttatcgctcaacggcgagatacccaccgatggcgagttgatatgctggatattggacatggtttagccatcgttatagagcgggaacgcagggcggtgatatttgataccggtaatcgctggaggacgggcagcatggcggaaaaagcgattttgccgtatctcaaatggcgaggtttaacggtggatcatattattctgagtcacgatcatttggatcattccggcgggttagagttgattcgcgctgcctttcctatggctaaagtgagggcaccttttcccataaagaatattgaacccaataggtggttattaccctgtcggcgaggggatcgctggcagtggcagcagcttgattttgaggtgctctggccgccacaattgaccgaaaatgcgcaaaacgacgattcctgcgtcattcgcatttcagagggcaagcatagtctgctgcttaccggagatattgaaaggaaaagcgagcgacagctggttaaaacatcccgccataaattgcggtctacgttgctacaggttccacatcatgggagcaatacctcgtctatcgctccttttctccgcgcggtacagcctgaattagctatggcatcggcatcacgttataaccaatggcacttgccagcgaaaaaagtcatcaatcgttacaaagaaaatgggattatctggcgtgatacatcgcgctctgggcagctcagtatctctttctcagaccatgattggcagattaaaggttatagagaacaattatttccccgttggtaccaccagcgatttggtgttgggagccataatgagtagaataggccgctatttcttctggtactggtatttgaatgatgaatgataaagatctctccacctggcagaccttccgtcgcctttggccgatgatcgctccttttaaaaccggtcttatcgctgcggcgatagcgctaattctgaatgcggccagcgatacctttatgctgtcgttgttaaaaccgttgctggatgatggttttggtaagtcgaacagttctatcctgatgtggatgccactggccattattggattgatgttggttcgcgggatcagcggttttatctccagctactgtatttcatgggtttcgggcaaagtggtgatgcatatgcgccgccgcctgtttagccatatgatgggcatgccagtatcttttttcgatcaacaatctacaggcacattgctgtcgcggattacttatgattccgagcaggtggcttcttcttcttccagcgcgttgattaccgtagtgagagaaggtgcgtcgattatcggcctgtttatcatgatgttttattacagctggcagttgtcgctgattttaatcgttattgcgccgatcgtttccatcgctattcgcatggtatccaagcgcttccgtaatatcagtaagaatatgcaaagcaccatggggcaggtgacgaccagcgctgagcagatgctgaaagggcataaagaagtattgatcttcggcggtcaaaaagtagaaaccgaacgttttgataccgtgagtaaccggatgcgtcagcagggcatgaaaatggtttctgcctcttctatttccgatcctattattcagttgattgcttcatttgcgctggcatttgtgctttatgctgccagtttcccaagcgtgatggaaacgctgactgccggtactattaccgtggttttctcttccatgattgccttgatgcgtccgttgaagtctctgactaacgtcaacgcccagttccaacgcggtatggcggcctgtcagacgttattcagtattctggatatggaacaggaaaaagacgacggcaaattagaaatcgatcgcgtaaaaggggatatcgatttccgtaatgtgacctttaaatacccaggcaaagaaacgccagcgctgatagatatcaatatgcatatcgaagccggtaaaaccgtagccttggtagggcgttcaggctcgggtaaatcaacgattgctaacctgattactcgtttttatgacgtcagctccggcagtatcctgatggatggccacgacctgcgggaatacaaacttagttctctgcgtaatcaggtggcgctggtttcgcaaaacgtacatctattcaacgataccgtcgctaataacattgcctatgccagagatgaacaatatacccgcgcagagatagaaaaagcggcgcgcatggcctatgccatggactttattgagaaaatggataacggtctggatacggtgattggtgaaaacggcgtgatgctttctggtggtcagcgccagcgtattgctattgcccgcgcattactgcgtgactgcccgattctgattttggatgaagcgacttcggctttggatactgaatctgagcgagctattcaggcggcgttggatgaattgcagaaaaaccgcacctcgttggtgattgctcaccgtctgtcgacgattgaaaaagccgatgaaattctggttattgaagacggccgcattatcgaacgtggggaacacagcgagctgctcgctcgtcaaggcgcctatgctcagcttagccgcatgcagtttggccaatgattgagcgtatctggtcaggcgaatcgcgactgtattggctgttattaccgctatcctggctgtacggtgggattagctggttgataaaaagcagttatcgactgggtttgcgtactagctggcgttcccctgtacccgtcgtggtggtggggaatctgactgctggtggcaacggcaagacgccagtcgttatctggctggtggagcaactgcggctgcggggtcaacgcgttggcgttgtttctcgtggttacggtggaaaagccgatagctacccgttggtgctgaatgaaaatacaccaacgacgcaggctggcgatgagccggtgttgatattccaacgtaccggtgcgcctgtagccgttgcgccgaaacgctcggaggcgattcaggctctgctaaaaaaccatgctcttgatgtgattatcaccgacgatggtttacagcattatgctttgcaacgagattttgaaattgtggtggtggacggcgttcgtcgatttggtaacggctggtggttgcctgccgggccaatgcgtgaaaggcctgagcgattggcatccgtggatgccattatcacgaacggcggaaccgcggctgcgggagaagtgccaatgctgctaaaagcggggcatgcggtgaatattctgactggtgagcaattgcctgctgaacagctaaagaatatcgttgccatggctggtatcgggcatccgccacgctttttccgaaccttacgtcaattaggggttacgatagagaaagaacacgcttttgctgatcatcaggatttttcgctgtcccagctccagagtctgaccagtgatagtcaaaccctgttaatgaccgagaaagatgcggttaaatgctgcaagtttgctcagcctaattggtggtatctgccggtaacggcagaattaccgccagcacagaccgagcaattattggctcggattatttcgctacgtagcgctgacgattagcgcatcacctaatccgataaaatctcaggcaaacctagaatctgagcacaggccgctatcgagcggcgctgtgtatcttcatacagtgccagttcatcgataaccggcgtgcctaaatctcgctcaaacgcttcccgactggagtgttcgctaaagtgcgtgcgcgctttatctcccaggttcgactgaaatattcctgcggcactgactggcagaaaatcctcatacaccaaaggttcaaagtcgatataaccgctattgataagatcgtcaagagaagcactgttgcggttttttagctcgatatctggcattttccccgttggaaaatagcggtagaaggccagtttctgcgagcgcatcgcctcgtgatcatcagggaaggcgctaaagtgatgagacagcagtgccatatacctattggcatttttctcacaggcgggctgttgcagttcatcctgtgcggcttgtaataagcgatcgtataatgcacgccctttggcggttagagcggcgccacgctgttcgatttcgccgaaacgtgcagtatgcttaccctgaatgctctgtccatttgcttgtgggaaagcaacctgctcttccaacgctttgaaactggtttggcgcagcaaaatagggcagcggcgggctggcgggccttcgattaccgctttaggcgtaatactatgctccggcattgctcgttgaacggcgtcgatatccagcgttcgtggcgttaaatgattaatgtgcggccctttaaatgcgactacgtcggcaatcaggcggtgctggtcgtgcaggcgttgatatatctcggcgttcacggtcgcagcattgtgccagcggaaagtttctaaagcctgagtgataaagtcgtcagcttcttgccgagtcaaaccgccagcgatttcatgacgtttaatcagctcaagagcgcgtggggtaaaaatagtgcggcgcgccagtatttccgccgctagctgacgtaattccggttgttcgatcagttccagccgcagcagggaagtgaataccctaaacgggctggcctgaagcgatgtctcgtggatggcgcgaaacgcggtggaatgtactggcactcccgctggagccagatcgtaataggccacaggaaccatgcccatcacagcaaacaggcggcgtaacatcgctagttcggcggcggttccgacgcggattgcgccgtgccgctccatattcagccgctcaatttcgccagtgcgggctaagtgttttttcagttccggatgttcagccatcgcctgctgattggtttgggcaacaatctgcaatagggtgctgtaaagaggaacttcagtttggtacatctcggacatggcacgagagaatccagcgcgaatctgatctggctgaatcagctgtggggtgttcataatagggtaactccttttatcgtctatattttttactgtttttcttagtacgaaaatggcttagaaaaaatagggatacatcaacgctaagctgccttttagtctaggcaggaaacgcagagtcgaggacaacccgcaggagaatattgaggaattatgcgccagctctcattgattcttatttcggcaataaaatagaagagaaaatagttgcgcggctatttattttatgcgttaatagccgcggcctgtgatgcagacctatttatgtgtaagcgtgtgtagtgagagtataaagagtactagcagttcctcccaagccgttatcatttgattccgcttcaaagacgaaccttctaagaatctccggtaaacaacttccataagtaacgttcctgaatacagtccagctattttagatagcaataagtgccttatggcgagttataaatatttttgaaggtaaagtttatgtctaagaagactggtcaagttaaatggttcaacgaaagcaaaggttttggttttattgaacaaaacgacggtggcaaagatgtattcgtacatttctctgcaatcgccactgacggattcaaaactctggctgaaggccagcgtgtagaatacaccgttgaagacagcccgcgcgggccggctgctgcaaacgttgttgctctgtaattcagagattaataatgtttaaaatattttaggataaaaaatggtaaagcaaatgcgctaaccgttgacctgaatatttaaaaattctaagacccgcattatgcgggttttttcattaattcaagctcatagaggtttaatcaaaaaactttaggatgggcaactgcatctaaacaataaataaaaatgagttgttaggatgcccagtaaaaggaaatttattatgacgttaaaaatgggtcgggtgaaatggttcaaccagctgaaaggctacggttttatttcaccactcgatggtgggctggatgtttatgtcagcaaaatggcaattgccaacaccaaaaataaatcactaagtgaaggacagaacgtagagttctccacttacaaaagtattcacgggccttctgcggccgatgtgattgctttttaaagcgaacggctaccaaggtagccgtttgtattttaccgatacttcgatatgcgatggtaatacaggtgctctttatttggttaattaaaatctgaattttattcgattcttaatgactaaagttagcgaacatcgcgatgattttatgaaacagtttcatcttcaatccaagaaataaattgtgtgatgtaagtcacaaaattctactccccgtatttcaacatatcaataacattcaccgaaaaatgccatttttctttgttgccgttcttgatgagttatcgctcgcagtaatggaatattgagttggttaacctgcctgagtggatatgctattctcttacgctttcctgctgtcgatagctccacgtcctcggagggtgtatggatcaccgtttactcgaaatcgttgcttgcccagtgtgcaatggcaaactgtattttaataaagaaaatctggagttggtgtgcaaagccgacaatctggcttaccccgttcgcgatggcattccggttttgctggagaatgaagcgcgcgccctttccgttgatgagaagcacgcatgagttttatcgcgattattcctgctcgttatgcttcaacccggctgccgggtaaaccgctggcggacattggcggtaagccgatggtggtacatgtgatggagcgcgcactggagtctggtgccagtcgggtgattgtcgccaccgatcatgatgacgtggttcgtgccgtgcaggccgcaggcggcgaagtttgtctgactcgcgccgatcatcagtccggtactgagcggctggccgaagtgattgaacgctacggtttcgctgatgacgatattattgtcaacgtacaaggcgatgaaccgctcattcctccggtgattatcagccaggtagctagcaatctggcggcttccagcgccggtatggcgacattggcagtgccaattgaaagcagcgaagaagcttttaatcccaacgcagtgaaagtggtgatggatgctcagggctacgcgctgtatttctcccgcgcggcgattccgtgggaaagagagcgttttgctcagtctaaagacagcatcggtgactgcttcttacgtcacatcgggatttacgcttatcgcgccggttttattcgccgctatgttaattgggcgccaagtaagctggaacagatcgagctgctcgaacaactgcgggttttatggtacggagagaaaattcacgttgccgtggcgaaagccgcgccggcggtgggcgtagatacccaggaagacctgcaaagagtacgggatattctactcaataaatcaagtagatagaaagtcgcgccgaaaccctaggtcgattgtaaaaccaaaattgtaaaaagatagcaaaaccaaacgccggagtgctggtcacccggcgtaattatttccccgcctttttgttgtttgcccgcttttgtttgatctgcattctggaaatatccccaagctcatctcattatggtgttctaccgcaatcgtcattctgctgtcagtcataatgggcaaacctagtatggaacagttaaaggccgaattaagtattgtattgggtgaatccattacccggcttgaatgtgtcagtgagcagccttatgcccatttgtttgcaatttatgacaaacaggggcacgcgatcccgttattggcgaaaagctatgtttgtcagggcattgcccagcaggaggcctataaactgtcgatgctggcgcgggacggagatattcgtttacctacggtctatggtttggtgatgacccatcagactccttacaaagaaattctgctaatggaacgactaaggggcgtctcagtggaagcgcccccacggacgccagaacgctggaatgtattgatggatcaaatcgttgaaggcgtactggcctggcatcgcattgatagccacggctgcgtcggcaatgtagacagtatgcaggaaaatgattggtttagctggtatcaacagcgggtagaggtgttatggtccagtttaagcaacctcagctcaccgctagtcactctggacgaccgtgccgttttataccgttctagggcgggattatctcagctttttgccgattttgacgacagttgcgtgctgattcacggtaatttaactctgagaagtatgctgaaagatccccgtagcgatcagttattagcgatgttaaatcccggctcggtgctgtgggctccgcgcgaatacgatcttttccgtctgagcgaagaagggatgccaagccagctattgtaccgctatttgcagaaagccccggtttctgaggcttttgtctaccgccgctggctgtacacgctttgggaattagtcggacgatttattcacaccggctatttcgaccggccactgtttgatcgcgcagccagccaactattgccttggcttgcctgatttccctttccttagggttaatgacttggagcgtcggcgggggatttcacccattgccagagtttccctaaggtttcgtaccaggcacgttcactgtgataaagatagctggcggcgggaatagcgcgttcccagctgtgtaacgggctggtaatggctaattgatttgctggggcgggaataggatgtaatcccttggcagtaaagaaattaatggcgcgcggcaggtgattagccgaagtgaccaacaggaaaggtttatctcccaccagagtggccacgtctgccgcttcttcttcggtatctttcggtttttccaacatcacaatatcactgctcgctacgcccagactttgagcaacctgcgcagcggttcgggcgctgctttgcgaagcggggccaaagccgccggtaaataccagtttgctgcccggatgctgtaaatacagtcgaataccttcagtgactcttggcaaactattgggaaataaattcgcgctgggtgcccaattcggattaaaggtatagccgccaccgaggacaacaatgtaatctacccgatcattaccctgataagtggcatacttattttcgataggtagcaataaacgatcggccacgggttgcaggctaataagcaataatactaaccagcttagggtgagcagcgccttgccacttttttgccagtgggtaaaccataataggattaaagccaaacctattaatataagtaaaagtggtagcggcattaataacccgccgaggaacttttttagggtgaatagcatgaaaaagtgaaccttttggctgaaaaaacggcatccgggcgggattactgcccaagaagatttattctacgtctggctgtgccaaaatagcatatttggggcgaactctttttcccctgtcgttatatacccgcgaagtttcgtaccctggcttacaggcgatagagcgaaagtgaaaaggtatagatttcattaacggagcagttgtccatgcagcaggatcgcaatttcgatgatattgccgaaaaattctcgcgtaatatctacggcacgacgaagggaatgattcgtcaggccgtggtttggcaagatatcaccgagctgttgacacagttgccgcagcgaccgctaaggattctcgacgcgggcggtggtgaaggacatatggcctgtcagttggctgcccttggacatcaggtaatgttgtgcgacctttccggcgagatgattcagcgcgcgcaggcggctgcgcaggaaaaaggagtgagccacaacatgcaatttatacaaagtgcggctcaggatatcacccaacatttggaacagccggttgatctggtattgtttcacgcggtgttggagtggattgcggaacccgaagaggttttacaggtactttgtgatgcattaacccccggcggcgccctgtccctgatgtttttcaattcaaacggcctggtgatgcgaaacgccgtgttgggtaacttccaactggctacgcctgatgtgaaaagacgccgccgacgttctctgtcgccgcagtatcctttggacccgcctaaggtttatggctggcttgagcaaatggggatgaccattagcggcaagacgggagtgcgggtgttccacgattacttaaagaacaaacagcagcaggtggaagaatttgctgagctactggcgctggaacagcgctattgtcggcaggaaccctttattagtttggggcgctacgtgcatgttatggcgtttaagccgaacctgaaggaccaactatgagtgaattttcccagacagtacccgaactggtcgcctgggcgcgaaaaaatgatttctcgatttcgctgccaacggagcgtttggcatttattctggccattgccaccttaaacggtgagcggttggacggcgaaatgagcgaaggcgagctgatcgatgcgtttcgtcacgtcagtaaaggctttgaacaaacccacgaaaccgttgccgtacgggccaataacgccattaatgatatggttcggcagcgtcttcttaaccgattcaccagcgaactggcggatggcaatgccatttaccgactaacgccgctgggcatcggcattaccgattattatattcgtcaacgtgaattctctacgctgcgtctttccatgcagttatctattgtggcgcaagagttacagcgcgcggcggaagcggcagaagagggcggcgacgaattccactggcatcgtaacgtctttgccccgctgaaatattccgtcgcagaaatcttcgatagtatcgatatgacccagcgcctgatggatgagcagcaaaacagcgtgaaagaagatatcgccgctttgctcaatcaggactggcgcgcggcgattgccagctgtgagctgttgttgtctgaaacttccggtaccctgcgcgagctgcaagatacgctggaagccgccggggataaattacaggctaatctactgcgtattcaggaagctactatcggtaatgcaggtttggatctggttgataagctggtgtttgatttgcaaagcaaactggatcgcattattagctggggacagcaggccatcgatctgtggatcggttacgatcgccacgtgcataaatttattcgtaccgctatcgatatggataaaaaccgcgtattcgctcagcgtttacgtcagtcggtacagaattactttgataacccgtggacactgacctacgccaacgccgaccgcatgctggatatgcgtgatgaagaactggctctgcgtagtgaggaagtgaccggggaactgccgccggatctcgaatttgaagagttcaacgaaatccgcgaacaaattgccgccatgattgaacaggcgctgctggtgtatcaacaacagcagataccgcttaatctgggggaagtgatgcgcgattatcttgcgcaatatccgcgtgctcgtcattttgacgtggctcgtatcctggtcgaccaggcggttcgcctcggtgtggccgaagccgatttttcagggttaccggcggaatggctggcgattaatgattacggagccaaggtgcaggcacatgtcatcgacaaatattgagttagtaatgccagttaaactggcgcaggcattgagcaattcgctgtttcctgcattggacagtcagctgcgagctggccgacatattggcatagatgagttggacaaccacgccttcctgatggattttcaggatcagttggaagaattttatacccgctataacgttgagctgattcgtgcgccggaaggtttcttctatttgcgtccgcgttcaaccacgctgatcccgcgttcggtcttgtccgaactggacatgatggtgggtaaaattctgtgctatctctatctcagcccggaacgtctggctcacgaggggattttcagccagcaggaaatgtatgaagagttgctgagtctggcggatgagagcaagttgctgaagtttgttaaccagcgctctaccggttccgatctggataagcaaaagttgcaggagaaagtccgtacttctctcaaccgcttacgtcgtttaggtatgctctactttatgggcaacgacagcagcaaattccgcattactgaagcggtattccgttttggtgccgatgtgcgcagcggcgatgacccgcgggaagcgcagttacgtatgattcgtgatggcgaagcgatggcggtggaaaacagtctgtcgctgcaagacgataacgacgagaacgaatcaacccaggcgaatgccgcggaaagtgcagaggatgaacaggaatgattgaacgcggtaaatttcgctcactcacgctggtaaactggaacggtttctttgcccgcaccttcgatctggatgagttggttactacgctgtccggcggtaacggagccggtaaatccaccaccatggcggctttcgtgacggcattgattcccgatctgactttgctgcatttccgtaacaccaccgaagccggtgccaccagcggttcccgcgataaagggttacacgggaaactgcgtgccggggtgtgttattccacgctggatgtgatcaattcccgtcaccagcgcgtggtggtcggggtgcgcttgcagcaggtggccggtcgcgatcgtaaagttgatatcaaacctttcaccattcagggcttgccaacggcgattcagccgacgcagatcctcaccgaagtggtaggcgagcgtcaggcgcgagtgctttctctgcaagagctgaaagagcgtgtggaagaaatggaaggggtgcagtttaagcaatttaactccatcaccgattatcactccctgatgtttgatttgggtgtgattccaaaacgcctgcgttcttctgccgatcgcagcaagttttaccgattgattgaagcctctctgtatggcgggatttccagcgccattacccgctcgctgcgcgactatctgttgccggaaaacagtggcgtgcgtaaagccttccaggacatggaagccgcgctgcgggaaaaccgcatgacgctggaagcgattcgcgtgactcaatcggatcgtgatctgttcaagcatttgatttccgaagccacttcctacgtggcggcggattatatgcgtcacgccaacgagcgccggattcatctggacggcgcgttagtgctgcgccgcgatttacttagcagccgcaagcagttggtgactgagcagtatcgtcacgtagaaatgtcccgcgagctggcggaacaaagcgccgctgaatccgatttggaaaccgattatcaggccgccagcgaccacctgaatttggtgcaaacggcgatgcgtcagcaggaaaaaatcgagcgttatcagagcgatttggaagagttgacttaccgcttggaagaacagaacgaagtggtggccgaagccagcgaacagcaggcggaaaacgaagcccgtgcggaagcggccgagcaagaagtggatgagctgaaaagccagctggcagattatcagcaggcgctggatgtgcagcaaactcgcgccattcagtatcagcaagctttacaggctttggagcgcgcgcgcgcgctgtgtcagatcccggatttgactgctgacaacgccgaagattggctggacactttccatgctaaagagcaggaagctacggaatcgctgctgttgctggaacaaaagctcagcgtggctgatgcggcgcacagtcagtttgaacaggcttatcagctggtggttaatattgccggtcaggtgagccgcagcgaagcctggcagaccgcacgggaattattgcgtgattggccgtcgcagcaacatctggcggagcgagtacaaccgctgcgtatgcgtttgtctgagctggagcagcgcctgcgttctcagcaggatgccgagcgtctgttgcaggagttctgtaagcgtcagggccaggtttatcagcctgaagagctggaagaattacagcgtgagctggagcaaaaagttgaggaattgtccctcagcgtgtccgatgccggtgaacgccgcatggaaatgcgccaggaactggaacagattaagcagaaaattcagacgctaaccagccgtgcgcccatctggcttgcggcgcaggacgcactgaatcaactgagtgagcaaagtggggtatcgctggaagacagccgtcaggtgacggaatacatgcagcaactgcttgagcgcgaacgtgaaactaccgttgagcgcgatgaagtcgcggcacgtaaacgtcagattgaagcgcaaattgagcgtctgagccagccaagtggtgcggaagatccgcgcatggtggcgttagccgagcgtttcggcggcgtattgctgtctgaaatctatgacgatgtcactatcgacgatgcgccgtacttctccgcgctctacggtccatctcgccacggtatcgtggtaccggatctgtcgctggttcgcgatcagttggtggggctggaagactgtccggaagacttgtatctgatcgaaggagacccgcagtcctttgatgacagcgtatttgccgtcgaagaacatgaaaaagcggtggtggtgaaaatcgccgatcgccaatggcgttattcccgctatccggaagtgccgctgtttggccgcgcggcgcgggaaaatcgtctggaaaccctgcacgccgagcgtgacagtctggcggaacgttatgccacgctttccttcgacgtacagaaaacccagcgcgcccatcaggcattcagccgctttattggttctcatctggcggtggctttcgatgcggatccagaagctgaaattcgcctgctgaatacccgtcgcggtgaaattgagcgcgctctgagtgctcacgaagatcaaaatcagcagcagcgtcagcagtttgaacaggctaaagaaggcattgcggcgctgaatcgactgattccgctggtgtctttgctgcttgacgacgctttgcaggatcgggtggaagaaatcagcgaagagttggctgaagcgcaggaagcggcgcgtcatattcagcagcacggtaatgctctgatcaagctggagcctttactggcggtgctgcaaagcgatccgcagcagcatgaacagctgaaagaaagctatattcaggcgcaaaacagtcagcgtcaggccaagcagcaggcctttgccttaacggaagtggttcagcgccgggctcacttcagctataccgattctgccggtatgctgaatgaaaactccgatctgaacgacaaactgcgtcaacgtctggagcacgcggaagccgatcgtactcgcgctcgcgagcaattacgtcaataccagacccagttcactcagtacagtcaggtactggcgtcactgaaaagttcttatgatgctaagcgggatatgctcaaagagctgacccaggaattgcaggatattggcgttcaggccgatgcgaatgcagaagcgcgtgcgcgagctcgtcgcgatgaattgcatgcggcgctcagcaccaaccgttcacgtcgtaatcagctggaaaaacagttgaccttctgtgaagcggaaatggatagcctgcaaaagaaactgcgcaaactggagcgagattatcaccagattcgcgagcaggtggtgaatgccaaatccggctggtgcgcggtgatgcgtatggtgaaagataacggcgtcgagcgtcgcttacatcgtcgtgaactggcgtatatggacggcgaagaactgcgttcgatgtcggataaagccctaggcgcactgcgtctggcagtatctgataacgaacatctgcgcgatgtgctgcgtctgtcggaagatccgaagcgtccggaacgcaaaattcagttctatatcgcggtttaccagcatctgcgcgagcgtattcgtcaggatattattcgcaccgacgatccggttgaagccattgaacagatggaaatcgagctgggtcgcctgaccgaagaactgactgcccgtgaacaaaaactggcaattagctccaaaagtgtggcgaatatcatccgcaaaaccattcagcgcgagcagaaccgtattcgtatgctgaaccaaggcttgcaggcggtttccttcggacaggtgaaaagcgtgcggttgaacgtgaatgtacgagaagcccatgccactttactggatgtgctgtctgagcagcaggagcagcatcaggatctgtttaacagcaaccgtctgaccttctcggaggcgctggccaaactgtatcaacgcctgaacccgcaaatggatatggggcagcgtttgccgcaaaccatcggtgaggagctgttagattaccgtaactaccttgagctggaagttgaagttttccgtggcgcagacggttggctacgcgcggagagcggggcgttgtctaccggtgaagctatcggtaccggtatgtctattctggtgatggtggtgcagagttgggaagaggaatctcgtcgcctgcgcgggaaagatatttctccttgtcgcttgctgttccttgatgaagccgcacgactggatgcgaaatctattgcgacgctgttcgagctgtgtgaacgattggaaatgcaattaattatcgctgcgccggaaaatatcagtccggaaaaaggcaccacctataaactagtacgtaaagttttccagaatcatgagcatgttcatgtggttggattacgcggtttcgccaatgatttaccggctatcgcgacaacacagacagaaataccgcaataacttcggaattaactgaggcgtaaataaatgaaaatggccgctaacagacggccattttttatagcttaaataaaatgagcttccattttatcgatgtgagaaatctgttagcgtaaagaatcgatttactttgtcgtataaataagtcaaatatcatttctgtttgtataataaaacttattagtaatggtcacgacaaactatgacgtacttagatgagcataccgggggcatagaatgtcgctagaaaagagaaattcactacggccattagccctatattgcgcacttatctgtagccagatacctatgttcagcgcttcagccactgcaccgactttgcccgtcgactctgcggctttgcccgtggagacaggaaccatgtcggtagcgcagagccgctctaaactgctggccgtgctgccaaaaaatatcacgccttattacgcttccaatctggcggagctatatgcgtctaaccagatgcggccgatgtggcaggatcgtctggcggtaaagagatttcagcagcaattagctgaactagcgatgtccggcattcagccgcagtttatgcaatgggtaaaatggttgagcgacccggaagtcaaaggaatggcgcgagatgtgattctgtcagacgcaatgttgggctacctgcactttgtgtcaggcgttggcgccaacggcagcgtttggctctatagcaacgtcccttacaaaatggccatgccgcctgccacgatactgaaccgttggcagcaagccatacgcgaaggcaatactgccgcctacctttcgactttggtaccacagcatccgcagtatgaaaagatgcatcaggcgctgaaaaccatgctggccgacaatcgtccttggccgcagtttaccggcgcggcgacgttgcgccctggtcagcttagcgatgatattcctgcgctgcgagaaatactggatcgcagtggcatgctaaacgccgctccagccgctccggttaagtcgccggaagtgattccgatggataatcctgcggtcgccgcagttaacgacgatttatccgtcgatgaagaaaaaactcgtgcgcaggctcattcgctggtagttagcccggcggcggccccgatctctgaaatggtcacttctccgcagactccggtagctaaacattccggcagtgcgctgagcgtgaccgacaatcaatacaccgaagatctggtcgcggcggtaaaacgcttccagcaatggcaaggtctaaccgatgatggcgtgattggtccgagaacccgcgaatggctcaacgtttctccgcaaatgcgagccagtctgctggcgttgaatattcagcggctgcgtattctcccggggcagatcgacacgggcatcatggtgaatatcccgaactattcgctgagttactaccagaatggtactgaagtattgtcgtcacgcgtgattgtcggccgacctagccgtaaaacgccgctgatgagtagcgcgctaaataatgtggtggtcaatccgccgtggaacgtgccaacctcactggtgcgtcaggatatcgtgccgaaagcgcgcaatgattccagttatttccagcgtcacggctatacggtgttatctggctggagcaatgatgcggaagttatcgttccttcaatgattgattggagcacgatctcgccgaataacttcccgtaccgcctgcgtcaggcgccaggagcgtctaactccctggggcgttataaattcaatatgccaagttctgatgccatttatctgcatgacacaccgaaccacggcctgttccagaaagatattcgggcattaagctccggctgtgtgcgcgtgaacaaggcctccgatctggccaatatgctgttgcaggatgcgggttggaacaatgcgcggatatcatccacgttaaaacaaggggataccacttacgtgaatattcgtcagcgtattccggtgcaactgtattatctgacggcgtgggttgcggacgatggtaaacctcaattccgcacagatatttacaattatgataaaacggtgagatcgggtgcacaaatcacaccacaagcagagcttttaatacaataaatgcagtaaaactcaataactaatggtctgaatacttggttgtctgacaggcgctcatttttgcgagcgcctaggaaccttcgcctcacgcgggttgactggttttccgcgggcggttatggttcggggcggtgcgttttgcgcttacttttgacattattgccgggtagaaacgatcatggataaaatcgacaatcatcgccgcaagtggctaaccttaggcgggacagcgctgggcctttcgctgttaccagggcacgcattcgcgaccctttctactccccgcccacggatcttgaccttaaataacctgaatacaggtgagtctatcaaagccgaattttttgacggcaaaggttacaataaagaagaattgagtcgcttaaatcatattttccgcgattatcgtgccaacaaagttaagcccattgacccacgcctgtttgatcaactctaccgcttacaaggtctgcttggtaccaccaagccggtacagcttatttctggctaccgttcgctaaataccaataatgaaatgcgtgaacatagccgaggcgtcgccaaacatagcttccacaccttgggtaaagcgatggatttccatatcgaaggtattcagctaagtaatatccgtaaagcggcattaaaaatgcgtgcaggtggtgtaggatattacccacgtagtaactttgtgcatattgataccgggccggcgcggacctggtgatcagcaatattcagccagtgggatagctttatcggttaggccactggagttggagccttatgaaatatcatattattccggtaacggcgttcagccaaaattgtactttgatttggtgtgatgcaacattgcaggctgctttggtcgatcccggtggcgacgccgaaaaaatcattgctgaagtgcgtcgtttgggcgtcacggtcacgcagatcctgttaactcacggccatttagatcacgttggcgcggcggcagaactggccgaattctatcaggtgcctatcatcgggccggaaaaagaagatcgtttttggttggaaggcttgccagcacagagccgtatgttcggtctgggggagtgtcagtcgtttgagccaacgcgttggttggaagaaggtgatgagataaatgtgggcgaaatgcggttatcggtgcttcattgtccggggcataccccggggcacattgtctttatcaacccgcaggcgaggttagccttaaccggcgatgtgattttcaaaggcggcgttggtcgtagtgatttcccacgcggcgatcatcagcagttgatcgactccatcaaacagaagctactgcctttgggtgatgatatggcgtttattcccggtcacggcccgatgtctacccttggccatgaacggcagagcaatccgtttattatcgacgaaccggccatttggtaaatggttctaccctgcagtagatgttctaaaggcgccgattggcgcctttttaaatgtgttttgatcgaataaggtaaacccgagtattttcctcaagaaacgataaataaatttgtgtaatatccgcagcgaacaatactaacagtagtatggtctcgaatgatgttgggctaacctcgaagattaatttattagccagctttaccgtagaggaaataaataacaatcattttttcttatagcagctttatagtcgtttcatggaatttactatgccatttcgtcgttccagtttaagaaagttgttgccccgattgggactatcctttttggtgttgctgctgtttatcctatttggtgctggcgttatttatgtgcagacagttaataatatgcactcagacgccgaaactaagttaaagcatgctcggcaaatgattgaccgtatttttgataatgctcatcttgccgcgactcgggtacagggcagcctagggcaaccttgcttacaggtagttcaaaatttacgcgatcaggtggctacaattcccgacgtccgctcggtaaatttaactcgacggggcaaccagatttattgcacttccctttatggcccttatgacgattacgtcaattcatcggcttacgttgatggtcagctatacctgatgtcgggaaataaagtgacgccttcacgaccggttgtgatataccgacaggtggccggggactacagcaccctggttggcattgatggttattacttacataatattcttaacctgctgagcggggatatacagctcagattgattatcggcgatcgttggatggatgccgcgggaaatacccatgcaggtaacccattgcataaaaacatgccgttgactcttgcttcggaaaaatatgcgtattccatctcaactaccctgactcatggccagtatctagcctatgcctggcaatatgccaccggcagcttaatatttttccctctgttaggttttatttccgcgtttctggtattccgtttgtgcggaaaatcctcttcgccgatgcagatactcaatcttgcgttggaaaacggggagttcgtgccttacctgcaaccggtagtgactgggaaaggggagcactgtatcggttgcgaagtgctaatgcgttggcataacccaactcatggcatgattcagccagaccgttttattcctctggcagaagatagcggattaattgtgccgatgacacgctctattatgcagcaggtcagcagtatgtttgctccttatgccagccagctaccggatgatttccattttggtttcaatatcagtgccgaccattgtcgtgatttaagtctggtagatgactgccgcgcatttattgccgcctttgcagaaaagcctatcaatattacgctggaactgaccgagcggaaattgattgttgccgatgaaattaccgatcgtttgttcgctgaactgcatgccttaggcgtatttattgccatagatgactttggtaccggccactctagtctggtgtatctgcaaaaattcaaagtagacttcctgaaaattgaccagagcttcgttggaatgatcggttctgatgcgttatccagcatcatcgtggagaatgtcatcgatctggcaacgaaaatggggttgatgacgatagcggaaggggtggaaaacgaaacgcaggcgcgttatctgcaagcgtgtaatgttgactatctacagggttatctatttggccggccaatgcctatggctgagtttatcgaaaaaaatatcaatcaggcgaccttcgaagaagcggcgtcggagctaaaacctaaaaagggtgcctaaggcaccctttaaccgcaatccactgaaaattgaatcagagtaccgcgacgatggcttcacacagtggagccatgttgtctggtgtcatgcctgccacgttaacacgacctgaattcaccgcatacacgccaaactcattacgcagacgcagcacctgttctttggtcaaaccactgaacgagaacatgccgttctggttaatgatgaaactgaagtcctgttttgcccctttctcttgcagggtattaacaaacagttggcgcatccgatggatacgttgacgcatatcggtcagctcttgttcccagatagcacgcagcgcgtcattactcagaatggtagcaacgactgaggcgccgtgagccggtgggttagagtagttagcgcggataaccgctttgacctggctgaaggatttctccgcgatatcgctgtctgccgcaacgatggtgcaggcgccgacgcgttcgttgtacaggccaaagtttttagagtaagagctgcaaacgatcagttctttatggctagcggcgaaaatacgcaggccctgagcgtcttcttccagaccacgagcaaaaccctgataggcgaagtcgaacagcggcagccagcctttagccacagacagttcggcaagtttagcccactgttcgtcggttggatcgataccggtcgggttatggcagcagccgtgaaacagcactatgtcaccggcttgggcttctgacaggcttttcagcaggccatcaaagtccagcgcgtggttggctgcgtcataataattatattcaaccacttccagaccggcagcggagaatacattcttatggtttggccagcttgggttactgacccaaacgcgtttagctgaagtttggtgagcaataaagtcggctgcgatacgcaatgcgccagtgccgcccggagtctgcgcagtgcgcgcacgtttttccgttacgattgggctttgtttaccgaacagcaatgcctgagtgcagctggcgaagaccggcaggccgtctatacccagatagttttttgttgtttcgttttccagcaaatactgttcagcttttttcacgctggtcagcaccggcgttttaccggtttcatctttataaacaccaatacccagattgattttatttgggcggtcatcggcgcggaaaatatcggtcagacccagaataggatcggcaggtgcagcagtgattttttcaaacatgtcagatgcttccatggcttagagttaagcggacagaatcatcagggtagcgccagttcagggctttgccaaccgtttgcgagaaaaagagatcaatcttgtgaggcggggtgattacgggtgaaaaatcgtcagaattactcaggaagtagcagattatgcacaatgtgagtcagggtttaaaagtaaaatacagaaagcaaaaggcagagccgaagccctgccttttttacttacaccaaccgagttggcattaagtcggacaacttagaactggtaaaccaagccaacacccactacgtcatcagtgttgatgccgttagcaacggtgaagtcatttttgtccagcatgttgattttgtaatcaacgtaggtagacatgtttttgttgaagtagaagtaagtagcaacagaagcatatttcaacaggtcttggtcattaccgtaaacgctgttcagatccttacctttagactggacgtaggccagggaaggacgcagaccgaaatcgaactggtattgcgcaacgatttcgatgttctgagttttgttagcgatagtgttgctagctgaaccgtatggcgtggtgttcagcgtttcagcatacattgcagccaggtatacgttgtttgcgtcgtatttagcacctacgttccatgactgagctttgtcgccttcagcagtggtgaagcgtttctgggtatcagtacgattagaagaagcataagctgcaccgaagcttacgccgtaaccgatatcataggtagaagagataccgaagccgtcaccgttttcaactttaacgtcgttacggccttcttcgtttttgccttggtattgcagagcgaagttcaggccatcaaccagaccgaagaagtcattgttacggtaagtcgccagaccggtagaacgggcattcatgaagttgtcagtcttagcgatagagtcgccgccgaatactggcagcacatcggtcgctgagctcacgtcatagagtacgccgtagttacgaccgtagtcgaatgaaccgtagtcaccaactttcagaccagcaaagcccagacgggttttgttgcctttgtcgccctgagattcggcgtggttagcctgaatgttgtattcccactggccgaaaccggtcagttggtcagtaatttgggtttcgcctttgaagccgagacgaacgtaagtttcgtcgccatcttcgcctgcgttatcggagaactgatggcgggcatcaactttaccgtacagatccagtttattgccgtctttattgtagatttctgccgcatttgctgcaccagcagccaacagagcagggattactactgcaagaatattgcgcttcatcattattattaccctcattggtgttattcggacacctgccactgccgccaataatttttttggaactattgttgagagtttggtgtcgtctgtgtctgagacgcagtgttccattcacagaccggttaatccacaccgaaaatgctactaattgacaaaaactgtttcattaaaagacaaagtgttactaaatgtaaaataaagggaactttgtgactaatatcaaactttaaaaaatgacaaaagccagcataagctggcttttttttagacaactaacagaaatcaattggaaatgattaatttagaagctggcgtttctgggggtacgtgggaacgggatcacgtcacggacgttttgtacgccggtcacataggcgatcaaacgctcaaatccaagaccaaaaccagaatgtggcacggtgccgtagcgacgaagatcacgataccaccagtaatcttctttattcaggcccatttcttgcaaacgttggtccagaacatccagacgttcttcacgctgtgaacccccgatgatttccccaatacccggcgctaatacgtccatcgcggctacggttttaccatcttcgttcatacgcatatagaaagctttgatgtctttcgggtagtttttaaccactaccggcgctttgaagtgtttctcagccagatagcgttcgtgctcggatgacagatcgataccccacgacacttcgttttcgaaggtctggccagatgcgagcaggatttcaattgcgtcggtgtaatctacctgcgcaaagtcggagcttacgaaacgttgcagacgatcgatcgcatctttatctacacgctgagcaaagaaggccaaatcgtcagctcgctcgtccagaacggcctggaagacgtacttaagcattttttcagccagagctgcaacatcatctaaagaggcgaaagcgacttccggctcaatcatccagaattcagccaggtggcggctggtgttggagttttccgcgcggaaagtcgggccgaaggtgtaaaccttggataacgcacaggcgtaggtttcaccgtttagctgacccgatacggtcaggaaggcttctttaccgaagaaatcttcgctgaaatcgattttgccttcgtcagtacgcggcaggttttccagatccaaagtcgatacgcggaacatttcgcctgcgccttcggtatcggatgcggtaatcagcggagtagaaacccagaaataaccgttttcatggaagaaacggtgaatcgcctgcgccaaagtgtggcgaacgcgcgcaacggcaccaatcaggttggtacgtgggcgtaagtgagcgacttcgcgcaggtattcgatgctgtggcgcttggccgccatcggataggtatccggatcgtccacccagccgacaaccttcacgctggtcgcctgaatttcgaaactctggccttcacccggagaggcaacgacggtgccggtcacttcaaccgagcaaccggtggtcagatgcagcacttcgtcctgataattcggcagagtattattaacgacggcctgtaacggatcaaagcaggaaccgtcataaacggcgacgaaggagatgccagctttagaatctctccgggtacgcacccaaccgcgtacggtgacttcactgtcaaccgcagcacggccttgcagtacgtcgactacaggcactacgctcatagatttctctctttataagttttggttcagaaataaattaaaacccaaaatatggggatgttgctatgttacttgcggcagtgcaggacacaagaggaaatcatcggattagtgcaagatttctgcggttaagataaataaatcggcggatggcgaagatcgtggctctgtatctgatgctatataaaggagggagagtgaaataggccggatgagggagactcacccggcaccctgcggttagctagccttttgtactaaaggcaaatcaaaggcttcacgcagttcatcaacgaaggctggatcctggcaaatggtttttccagggctgtctgacaatttggccacgggctttccattgcattccaccagcttaatcacgatatttagcggtttgacacccggaatatcacaggtcaggcgggtgccaataccaaagaccagattgatccgctgatagaaatggcgatataaatacagcgccttctccagatcaagattatcggaaaacaccagcgttttgctcattgggtcaattcccagcttgataaagtgagcaatggctttttcaccccattctaccggatccccggagtcatggcgtaaaccctgatagcgagaggcaaaaggcagatcgaaatcgcgcaggaaagcatccatggtaatgcaatcggttagagcaatccccagttgatccggatattcatccagccaggcttgtaaggcaacgcgctgactgctcgccagctcggggctgatttgctgatgagcctggaaccattcgtgtgcttgagtgcccaccggcgtcagagataatcggcgagccagatcgtaattgctggtgccaaccaaataaggaaactctgcttgtaaggtgctgacaaccgcctgctgcacttcaccggagaaacggcgacgggtgccgaaatccatcaatttgaaacgggagatatccacatcaccgcttaattgattgaattgtaacagcttggcgcggagtttctcgatagccatctgcgggacgatctgcggcgagcggtggcgatgcaccacttcgctgataaccgccagcaatggtacttcccacataataacttcacaccacagaccggaaattcgaatatccagtttcccctcgcgggcggatacggtgacctgctgcgggttgaaccgaaaatctcgtaaccaattcagataatcggatttgaagaaggggaggccggacagataggcgaattcgtccttggttaacgccagttcactcataagagcgatctgacgacgaatttcatccacatagtcgcccagcaattcgtcaccgcggcagcggaattccgcagcaacggtaatatggcgataacgatgaaacactgcttgttgcatatgaagcttgtaagcatccgtatcaagcaatgaagtcaaaatcggagaggcgtcttgagtcatggcgcgttacagcatcctcgtaggagcattttccagattcggcataatcaataaagttgcaggagtataccggtattatcctgtgattgaaccctcataacaccataaatggcgtaacaagatctagagttaaacgtgccatcaactttactcgtcggccttttagtctatggaaaataaaataagctaaatattttcgtgacttagatgcaggggttatttattggtcacccgaaatgtagggttattatttgtcattttttattcttaacagaaacaaaatacctggttgatttatcgtcagaaactgcgctattcagataaattttattacagttatttttataaggaattaattgtgtgggaaaaccacaataaaaacggcgtggttgttctgttattaggctaaataaaaccgtttgcggtataaaaactgacccgatctttgccattgcctttgcaataatacaaggcttcatccgcttgcttaatagcccttttcatttctgagtagttgtttagcatggcaatgccgcagctgatacggaacataaccgtggtgccatcttctaatttcagcgtcagttgtttcacttttaaccgtaggttattcatgattcgaattgcgtcctccggcgtacagttacttaatacaatggcgaactcttctccgccgtagcgtgaaaagatatcggtggagcggaaatgggatatcaggagcttactgaattcaatcagcaccttatcacctacatcatggccgtaggtgtcattaagtgacttgaagttatcgatatcgatcaaagcgaaagccatcggataactagcggcaggcatggcttcacacaggttaaacagttttcgacgattataaatattggtcagcggatcaataaaggacgctttttccagctcaccaatcaggttttgtttttcagattcaagaaggactttatctaactgataacggcgcagatctttaattgcgtcggtaatagcaataagatcctgactcagataaaccccctgattctcaatattcatatttccctgagagagctttttgatattcgttgtagtttcagataaccatttattgatattaacgcaaaatatcaggcatgggacgataataaatagagctaataacattccgatggaaagggtactctctactcttatgttactttttaggatgttacttttgagtgattttatttctttttcaaatacttggctattaaatctttgggaaattgagtcaatataatttacatactcataaatatctctgacattgtacttttcgtttttggtcatagagagatataaatcattggcgattttttcgctgttttgcagcgatatcttgccttgtaaatcgttgactacgtgactcatctgattgagtctgtatgttttttcgataaaaccgaaacgaggttgcagcgagtagagcacgccggtaagttggatcgctttaagatagggctctggtcgctgaactttggctaaattgatatcaacgatctgatcgactaaatcggtaagggtcataaccaaacggctatttattctgatggcttctaggaagatatatgattcagattttatcagacggttgtcgatagtataaagcgagtatttctgtttgacctcagagatataaaatgcattattcaggtcatagagataactattgaccaaaggcattcctgaacttgcacgcaaatcattggctattaatttatccatcagttgaaccgaagaaattaccaggtatttataagtggctcccagtttttcaaccataattgaattggcattttttttaaatatcgctattttcttagtggcagttattactgcctgattgatttcttcctggtttatatcggttttgattaaactgattttttttaagcgatgcatgtgcaatacggcctgaaatgcctcggtaaattcttgtaatcgctcaattttatacaggtttaatttattgttttctgcgatggcgctattgcgagatatgttggtgtaaacgaatacagagaaaaatagcattaatgaaagtgtgaaaaaataaataagatattttactctcatagccgtattgttcccgatcagccttcgttgtgcattacaccacttactccgtcatatccattcgaatcagcttgttggtgatgagctattgcgtgaatgataccactctgagattaaacttaacgagagatatttctgatactgtcagtcgtatttttacactctatttctattctagttcattttgtccacataccttggagccgacacatattccgcaacaaaaaacaccaacggcaacgagtgttatgctgagtaatagccagacaataaaataaacagagtatttggttttcaattacctgacggctatcaccttgaccagttggggtcatcgtagttatccctgcgatacctgttgttcatagaaatccttcaggttctcaactgggttttttttacagctgtgatacatttaaattcactctgagtctggatggaaagtctctgtagtacagagattccgccatctgagtacaaaaacaccagaccgggtaatcatattcactgatgacgtcaaaagggtttttatgacacaacagccgcaagccaaataccgtcacgattatcgtgcgccggattacaccattaccgatattgatttaaatttcgagttggacgcgcagaaaacgacggtaacggcagtcagtaaagtaaaacgtcagggaaccgcaggtgccccactgatcttgaatggcgaagacctgacgttattaagcgtcagtgtagatggtcagccgtggcctcactaccgtctacaggacaaaactctggttatcgaagaattaccggagcagtttactttaaccatcgttaatgacattcacccggcgaccaatacggctcttgaagggctttatctttccggcgaagcgctgtgcactcaatgtgaagccgaaggtttccgccatattacttattatctggatcgtccagatgtattagcgcgttttaccacgactattgtggcagataaagctcgctatccttatctgttatccaatggcaatcgtctggaacagggcgaattggctgatggccgtcattgggttaaatgggaagatccgttcccgaaaccaagctatttgtttgctctggtggcaggtgattttgatgtattaagagacacctttattacccgttcaggtcgggaagtggcgttagaattgttcgtcgatcgcggcaatttggatcgcgccgattgggctatgatttccctgaaaaattccatgaaatgggacgaaactcgtttcggtctggaatacgatctcgatatttatatgatcgttgccgttgatttcttcaatatgggcgcgatggagaataaagggctaaatgtcttcaactccaaatacgttctggctaaagcagaaacggctactgataaagattatcttaatatcgaagcggttattggccacgaatatttccataactggaccggcaaccgcgtgacttgtcgcgactggttccagctcagcttgaaagaagggctgacggttttccgcgatcaggaattcagctccgatttgggttctcgtccagtaaaccgtattgataatgttcgtgtgatgcgagccgcgcagtttgcggaagatgccagcccaatggctcatgctattcgtccggataaagttatcgagatgaataacttctataccctgacggtgtatgagaaaggatcggaagtgatccgcatgatgcatacattattaggcgaagctcagttccaggccggaatgcagctgtatttcgagcgccatgacggcagtgctgccacctgtgatgattttgtgcaggcgatggaggatgcgtccaatgtcgatctttcgctattccgtcgctggtatagccaatccggtacgccgttagtaacggtacgcgatgactatgatgcggaaaaacatcaatatcacctgcatattagtcagaaaaccttgccgactgccgatcaggccgagaagttacctctacatattccgttcgatattgagctttacgatagcaaaggcgaagtcattccacttcagcgaaacggtttgccggttcatcatgtgctgaatgtgaccaaatccgaagaaacctttacctttgatcaagtgccttgcaagccaacgccttcgctgctgcgggagttctctgcgccagtgaaactggattatccgtatagcgatcaacagttaactttcctgatgcagcgtgcgcgcaatgagttttctcgttgggatgcggcgcagaccttgctagcgacctatttcaagctgaacgtagcgaaatatcagcaaaaacaaccgctttccttgcctctacatgtggcagatgccttccgcgcggtattgttggatgagcagctggatccggcgttagctgcgcaaattctgactttgccttcagagaacgaaattgccgagttgttgacgactattgacccagaagcgatcggggcggttcacgaagcgattactcgttgtctggcgcaagaattagccgacgaactattggcagtatatctggctaatcagacgccggaatatcgggttgagcatgcagatattgctaaacgtgcgttgaaaaatacctgtctggcttatttagcgtttgctgacgccgagtttgctaacaagctggtttctgcccaatatcatcaggctgataatatgactgattcgctggcagcgctgtctgcggcggttgcggcgcagttgccgtgccgtgatgagctgttggaagccttcgatgtacactggaatcacgatggtttggtgatggataaatggtttgccttgcaggcatccagcccagccgatgacgttctggaacgggttcgcgcgttgctgaagcatccgtcctttagcctgagcaacccgaaccgcacccgcgcgctgatcggggcgtttgcttcagctaatccggcggcattccacgctaaagacggcagcggttatcagttcctggttgagatcttaagcgatctgaacactcgtaaccctcaagtcgcctcacgtttaatcgagccattaattcgattaaaacgttatgacgccgaacgtcaggccaagatgcgtcaggcgttggaacagctcaaaggactggaaaatctgtctggcgatttattcgaaaaaatcaccaaggcgctggcagcgtaatgcgataatcagcgattgacgggagttaaactcccgtcaaagcaaggatgtttatttcttgaacctgatgatgaattttgccgattctacagtgatactacctacttatttcatacaccgtttttatttacagcgctgagttgatcttgtttttcttgcctgtgctcaatttaatttaaagatagaatatattactactcatttgaaatgccgaaacgtgtttaagtttctgttattctgatgcggaatagtggccatatttttaaataatggaattgaattaaccttcataatagacttaaatatggcaaataatattttcttgacgataaatggaactgcgcaggggttaatatcttcaggttgtttgacgcaagactccatagaacataagcaaccaaattggtcatgaaaatgagatatttgtttactagttttcgcatagcataaaatgaattatttcatcttaagtttgatttctaacgcacatcgccaaacggcgctcaagaaaagtaggctagcatagagtggagggatgcgatactaacaggcctaaacgttaattatccgaatagcttgagtcatgggcatcgcagccagaagagcttacatccgttcaatattaagatattatttgcgaatatcatgcggctggcatatcaggtcatggcttatggtaaaataaaaaccactgatttataacgtattttctcaataggaaaatgcataaacgccaatgccgagaaatgccaggttttctcaaggtcagtgtacccattctgttaagtctttagcgtttttgacaaatatcattggcctgtttggtctcgatttccaatatgtcccatacccttgagtagacaaagttgtggtgaggtgaaaatgaaaaatagtcacgagtgcaagaagaaatatcgtcatgtaggccaataaaagcatatgttttaaattctatgacgttactctttcctgtcatcaatatatatgcagatattatcataatacatataagtgaatccgcaaccatatagttggcaaggcgatataacgacgcgaaaacggggtgtgacagatacgggaatatttctttatttaaaacatagagaatcatccataaacctaatagagcaattcctaacagaacaatgaaagaaaaaaaagactcactttatctgtaatggattattttctacttatactgtttttcatattcttttattcagcagtatttccgctataggtaacagcttggcgaatctaatctatcaccagcttcgctagcatgattacctctaaatcgtcagcttaggtggcattgaatcgacattaccctgaagagagacattgtttttaggcatgaaaggaacccttggcgcggttggttttactcattcctgaccaataaatacacccgacattaacaagtgatgatcaaaataagcctccggtagcattcttttcagggctttacttagcaaacgtttactttgtgaaaggatatatttaccattcgtgcgtttatccactcggtggagagttcgtcccgcttgccgctggcgaacgttgccgatagaaaacgttatcgatagaagaataggctgaagaactcgcgttttcattccattttcctcagtcacttgcttgtcaccgggagcataggagatcacatgttttatccgatcgttaaaaaggcactgttccagttcaatccagagcgcgctcatgaactcactttccgtcaattaaaacgtattacgggtacgccgctggagtttttagtgcgtcaatcggtgccgacgaagccagtgagctgtatgggactgtcatttaaaaacccagtaggtttagcggcgggtctggataaaaacggtgattgcattgatgccttgggcgcaatgggatttggctttattgaagtggggacggtaacgccgctgccgcagccgggaaatgataaaccgcgcttattccgcgtccttgaagctgaaggcctgatcaataggatgggctttaataaccttggtgtggataatctggtcgataacgttaaaaaatcacattttggcggaattcttgggattaatatcggtaagaataaaggtacgccggtagagaatggtaaagatgattatctgatctgcatggataaagtttatccgtacgccggttatattgcgattaatatttcgtcaccaaatactccagggctacgttcattacagtatggggaagcgctggacgatctgctggcggccgttaaaaataagcaggcggaactgcatcagcgtcatcataaatatgtgccagtcgccgttaagatcgctccggatcttactgaagaagaattgatccaggttgcggatagtctggtaaaacataatatagatggcgttattgctactaataccactttagatcgttctttgatccaaggtttaaattattgtgaacaaagtggtggattaagtggccgcccattgcaatctcgcagcaccgaagtgattcgccgtttgtcgcaggaattgcagggacgtttgcctattattggcgtgggcggaattgattctctgatggcagccagagaaaaaatggcagcaggggcttcactggtccaaatttattccggctttatcttccgtgggccgggtttgattaaagatattgttactcatatctaattatttctcttgattttcgtctgggggtttatttattcccccagctcgtctatattttatccgttagtttaaataaacatcgataaatgtaaatgaattgagtttgattagataaccggacaactcaattattgagcggtaaatgttggcagtgggatgggaaggaataaaatatgcggattaaacctgacgataaatggcgttggtattttgatgctgaacacgatcggctgatgctggatttagccaatggtatgatatttcgttctcgcttccctgctaaaatgttaacgccagatgcatttagtgaatccgcattttgtgtggacgatgctgctctttattttgaattcgaagatcaatgtcgccaaattaaattgagccacgaacatcgtgccgaactggtattaaatgcgctggtggcattccgtttcctgaaacctttaatgccgaaaagttggtattttgtgcaacaggcaaaagttttaacgccagaaaatggcagcctggcgttagtgaaactgatggaaaccggggaagaggttagagtattagtggttgagtccggtgattccgctagcttatgtttattggctcagcctcaattacagctggcgggcagaaccttgatactaggcgatgcgattaaaattatgaacgatcgtttattgccattagtgatagaaaataccgatattcaggcgtttgaccgggcggtctgattgataatgactgcttgataagattaatgccatccgcccaatttcggtttgttctttcgaggctatttccccgtcagtgagatatcaccttttggcacacagctgcacgccagaataacgccattttctgcaatagcactttgttttaacggtgccacttcaccctgcaacaatgtcactttgcagctaccgcatattccagcccgacatgaataaggaatgcgaatactttgctgttccagttgctccagtaatacctgctgattattaccagtaaaacgaataccgttatattcaatagtgacggcgcgagtactatcctgcaccatcggtaaagcctccgccacgacgccagcgccataagggcggggcggtttggtcgccagaacttcaatattatcgccgacgcgaataatgccgctattacgtgcaatcatattctgaccaaaatccacatcgccattatctgcagttcggaatttctgtagtgtagttaaaggttcggcggtaggatgcttttttccacgctcaacgctgacggtggtcaaaatacagcggctgcatggtttcaccagatcgaaaatcacatcgccgacgcgaatcacctgccagctatcttccgcaaaagcgctggcgccggtgacgactaaattcggccgaaactgttcaatcttaatgctgccggggcatcgttgctgtaattcggcaaaagaggcttcattaatcagcaaatagggatagccatcggcgaaggaaagcggaatttctggctggcgtttcacccgacgagtcagttccggcccaagccagcgtaattgaacttcgcgttggaaatagccgctgagccagtcatttatttccgcaggggcaatcagagcggtaaaatgatttccccatacttcggtgggtgccgcagtgggggaaaaatcattaaagcggatactggcgctttcgccgtctggcgcggtaagaaataaaccgtcaaccagcagcgccggagtaaaagtcaccatcttcggattattacgagctgtaataaaagtgccatccggttcggtgatcatgaatacccggtcaaaagccaggccgctactgccgacctgagcatgggaaagctgtaatccacgcatggattttaccgggtgaatgtaaagtttagagagtgtgatcaccatgtgctccatgcgtgtatgaaattagaagggagcaactttatgacaagcggacaggattagctataatgcgcaacaattttatttttggtgatagtgcgatatgaactctttgtttgccagcacggcgcgtggactggaagaactgttaaaaagcgaactcgaagcgctgggtgcccacgactgtaaaatagtgcagggtggggtacattttcagggtgacgatcggcttatgtaccaaagtttgctgtggagtcgtttggcttctcgcattctgctgcccctgaatgaatttaaggttcacagcgatctggatctttatctgggtgtgcaagctatcgactggccgtcgatctttggcgtggacaaaacttttgccgtgcattttagcggcgtgaatgaagaaatccgcaatagtcagtacggcgcattgaaagtaaaagatgcgattgtggatagcttcactcgcaagatcgatcaacgcccaacggttgccaagcaacagccggatattcgggtgaatgtgttcctgcaacgtgacaccgccagcgtggcgttggatttgagcggcgaaggcctgcatcagcgcggttatcgcgatctgaccgggcaggcaccgttaaaggaaaacttggccgcagcgattattctgcgctctggctggcaggcaggaacgccaatggtcgaccctatgtgtggttccggcactttgctgatcgaagcggcgatgatggcttcggatcgtgctccgggactgcatcgccaccattggggctttactgcctggaatagttttaacgaagagttgtggcgcgaactgacggcggaagcacaggtgcgtgctcgccgtggcctacaggaaaccacgtcccgcttctttggctccgatatcgatcgtcgggttattgaaatggcgcgtgccaacgcccgccgcgccggtgtagcggaattgattacgctgaatgccaatgacgtcagcaaactggttaacccgctgccggaaggtcctgtagggacggtgatcagtaacccgccgtacggggagcgtttggaaagtgagccagcgctgatcgccttgcacaatatgttcggccgtatcatgaagacggcgtttggcggctggcgtttatcgctgttcagcgcctctccagaactgttgagctgcttgcaattgcgtgccgagcgtgaatttaaagcgaaaaacggcccgctggactgtgtacagaaaaactatcagctggcggctaacccgcagggcgccagcggcgttcaggtggcagaagattatgccaaccgtctgcgcaagaatgtgaaaaagctggataaatgggcgaaacagcagggtatcgaatgttaccgtctgtatgacgcagatttgccggattacaacgtggcggtagatcgctacggcagtaaagtggtggtacaggaatatgcgccgcccaaaactgtcgatccgcaaaaagcccgtcagcgcctgttcgacgtgatcaatgccactctggcggtgctgaatttaccgtctaaccaattggtattgaaaacccgcgaacgtcagaaagggaaaagccagtacgagaaactggcgcagaaaggcgagttcctgctggtggaagagtataacgccaagctatgggtgaacctgactgactatctggacaccggtttgttcctcgatcaccgtctggcgcgccagatgctgggcaaaatgagccaaggtaaagatttcctgaatctgtttgcctataccggtaccgccagcgtgcatgccggcttaggtggcgcgcgcagtacgactacggtcgatatgtcccgtacctatctggaatgggcggagaaaaacctgcgggttaacggtttaaccggccagcaacatcgattgattcaggcagattgcctgtcttggttaagtaataccgacgagcagtttgacgtgatttttatcgatccgccaaccttctcaaactccaagcgtatggagaccacgtttgacgtacagcgcgatcatctggtgctgatgaaagaacttaaacggttactgcgtcgtaagggaaccattatgttctcgaacaataagcgtggtttccagatggatttggccgggattgaagccctggggctggtggcaaaagaaatcaccgctcaaacgcaatccgaagactttgcccgtaatcgtcagatccacaactgttggctggtaacccatgccaacgaggaaaagtagaaactatgtcgttaattagcatgtcaggtgcctggctgtcgttcagtgatgcacctttgttagacaataccgaattacatattgaaccgaacgaacgcgtctgtttggtcggtcgtaatggcgcgggtaaatccacactgttgaaaatcctgagcaaggaaattgcactggacgacgggcgcattgtgtacgaacaagatctgatcgtggcgcgtctgcaacaggatccgccgcgtaatgtggctggcaccgtgtttgacttcgttgcggaaggggtgcaggagcaggcggagcatttgaaagcctaccatgccactttgcatcaggttgagctggatccaagcgagaaaaatctgaatcgtttggcggcgttacaggaaattcttgatcatcagggcctgtggcagttagatagccgtattcatgaagtgctggaacagttgggtctgaacgctgacgccgagctgtcctccctttccggcggctggctgcgtaaagcggcgctgggtcgagcgttggttagttcgccaaaagtattgttgctagatgagccaaccaaccacttggatatcgaaacgatctactggctggaaggtttcctgaaagagtttcagggtagcatcatctttatttcccatgaccgttcatttatccgtgcgatggcaacccgtattgtggatctggatcgcggtaaactggtgtcctggccgggtaactacgagctgtatctggcgagcaaagaagaggcgctgcgggttgaagaactgcaaaatgctgaattcgatcgcaaactggctcaggaagaagtgtggatccgtcaggggattaaagcgcgccgtactcgtaacgaaggccgcgtgcgtgccttgaaagcgttgcgccaggagcgttctgagcgtcgtgaagtgatgggcaccgccaagatgcaggtggaagaaaccgtgcgttcgggcaagattgtcttcgatctggaaaatgtcaattatcaggttggcgataaagtgttggtgaaaaacttcaccgcgcaggtacaacgcggcgataaaatcgccctggttgggccgaacggctgtgggaaaaccactttgctgaagctgatgctcggccagttacaggccgatagcggtaaggttcactgcggtaccaagctggaagtggcttacttcgaccagcaccgcgctgaattggatccagagcgcaccgtgatggataacctggcggaaggtaaacaggaagtgatggttaatggccgttcacgtcacgttctgggctatttgcaggacttcttgttccatccaaagcgggcaatgacgccggtgaaagccttgtccggtggagagcgtaaccgcctgttattggctaaactattcctgaaacctagcaacctgttgattctcgatgagccaaccaacgacttggacgtcgaaacgttggaattgcttgaagagatggtggatggctatcagggcaccgtattgttagtcagccatgatcgtcagttcgtcgataactctgtgaccgagtgctggattttcgaaggcaacggcgaaatcagcagctttgtgggcggttattacgatgctcataaacagcgcgctgaagccaagccgattcgccaggctgcgccgaaggtagaaacgcctaaagccgctgccccggaaaagaatacagcgtcggctaagcgttcgacaggtaaactcagttataacttgcagcgtgaactggatcagttgccgcagcagcttgagaaactggaagatgaaattagcgcattacaagctcaggtgagcgatgccaatttcttctcccgtcctcatgaggaaacccagcaggtgctaaaagcgctggccgccgcagaacaaacgttggaagtggcttttgctcgttgggaagaattggaagcacagaaaaacggctaattaaagcgggggagcgtagggctattgctgcactccactgacttaacggctgccataccgttctgttgccaatgcgtaaaacgaattgtgtagcagaacggtattttttggcgctgaaatattgccgtgaaggagagttctattgtgttctgttagccatcacgatcacggccatcatcatgttgaaagtaatgacgcgatgctgtgcccgcagtgcgatatgctggtggcattgccgaagttatcttatggcaccaaagccgtttgcccgcgctgtaaaacaacactgagtatgcggtgggaagaaccgcgtaaacggcctataggctatgcgctcagtgcgttatttatgctattggttgctaacctgttccccttcgttaatatgcgggtggcagggattaccagtgaaattacgctgattcaaattcctcgcgttatgctgaacgataattacgccagcatggcgacgctgttcatggtgctggtgcagttaatccccgcattttgcatgatggcgattatcctactctgttcaggtactcgcctaccgaaacacctgaaaaccgtgatggccaaagcgctgtttatgttcaaaacctggtgtatggtggaaattttccttgccggtgttttggttagcttcgttaagctgatggcctacggagatatcggtatcggcagcagttttgtgccttactgcctgttttgcctgctacaggtgcgagcttttcaatgtgtggatcgccgctggctgtggcaggatatcgaaccggctccggcgataaactgcgagctgacctttggccgcacggggatccgtcagggcgtgcgttcttgctcttgctgcaccgcgattttgccggtcaatcaacgagaatgtccgcgttgccacacccgcggctacgcccgtcgccgccatagcctgcaatggacgatggcgctgctgataacctctatcctgctgtatattccggcaaatctgatgccaatcatgatcaccgaagcgctcggtaatgaaatgacttcgaccattatggccggtgtgattttgctatggggagaaggttcctatccggtggcaatggtgatctttatcgccagtattatggtgccttcgctgaaaatgctggccatcggctggttgtgctgggacgcgaaagggaagggcaaaactgatagcgaacggatgcattttatttacgaagtggtcgagtttgttggccgctggtcaatgatcgatgtttttgttattgcagtgctttcggcgttagtccgcataggccagctcatgagtatttatccggctataggcgcattactattcgcaatggtggtgattttaaccatgctggcagcattgacctttgatcctcggttaacctgggatcggatgagtgaaacaaccaagaaggagccgcaaggtgacggacagtaacccaagccatggtgtggcagagatagaaaaaatcaaacgctggtctccggtgtggatcattccgatagtgaccgccctgatcggcgcgtggatattgttttaccactttagccatcaagggcctgaggtgactttatatacgcaaaatgccgaaggcatcgaagcgggtaaaaccaaaatcaaaagtcgcagtgtcgatgtcggcacggtagaaatggtgactttgagtaacgatctcaatcaggtcatcatcaaagcgcgtttgaattcaggcatggagaagttactgcgtaccgattcagcgttttgggtggttaagccgcaaattggccgggaaggcgtgtcaggtctgggtactttattatctggtgcctatatcgagctacagccgggccgcacggataaaagccatgatgagttccatctgcttgattcaccgccgttagcttctccggatgccaaggggttgcgtatcgtgttggatagcgatcaggcagggcaattgaacgccggcgatccggtgctgttccgtggttatcgcgtgggttcggtagaaaccggttctttcgacccaacgtctcgcttaatgcaatatcagctatttatcagcgcaccttatgacagtctggtgacttccaacgtccgcttctggaaagatagcggcgtggcggtggatttatcctcgcagggaatgcgggtggaaatggcctcgctggcgaccttattcagcggcggcgtcagtttcgatgtgccggagggggtcgctttaggtaagcctgttactcaggataaaactcagtttaaactgtttgataatcgcagcagtattcagaattccttgtttaccgaacatgatgatttcctgctgttcttctctgactctgtgcgcggtttgcaggctggcgcgccggttgaattccgtggtattcgcgtcggtaccgtaggcgatgtgccgttctatgccgaaggcgtgaaacagcgcctggataacgatttccgtattccggtattaattcgcatcgaaccgggccgtttccgtaacgatctggggccggatgccaactttgagcaaattctaaaaaccgccaaagagcgtggtttacgcgcatcactgaagtctggcaatttgttgaccggcgctttgttcgtcgatttagacttctatccggatgctaaaccgtggaaagggccgcaggacatagcgggttattctctgataccaacggtgagcggcgggctagcgcagattcagcaaaaagtcatgatgacgctggataagatcaataatctgccgttaacgccgatgttgcatgaagtcacgcagacactggccgaaagccagagaaccatgcgtgaaacccagaaaacgttggcgtcgctgaacgagatcacctcaagtcaggcgatgaaagatctgccgcaagatcttcagaaaacgttaaccgagctgaatcgcagcatgaaaggcttccagccgggttcacctgcctacaataaaatggtcggcgatatgcaacgtttggatcaggtattacgcgaactgcaaccggtactgcgtaccctgaatgaaaagagtaacgcgctggtatttgaagccgccggcagccaagaccctcagcctaagaaggccaaaaaatgatgaaatggatgatggtatttatggcgctggtactcagcgcctgtagcagcagcacgtctaaaacctactaccagttacctgcgttaggtacgccggttgccgtcagcagcgacacacaaggtgtgactcggcaactgtggctggaacatgtcagcgtcgcggattatctggccgcgtccggcgtggtttatcagacgaatgatgtgcagtatgtcattgctaataacaatctgtgggccagcccgttggatcagcaattacagcaaacgctggttaccaacctgagcagcgcattgccgggctggctggtttcagctcagccactggacagcgatcaggcggtgttaaatgtcacggtgaccggtttccatggccgttttgacggtaaggcaatagtcaaaggggtttgggtggtgaaatatcagggcaagctgattaagcagccatttgatctggaagtgaagcagagcgaagatggctatgacgcgctgattcgtacgttggcacaaggctggcaacaggaagctcagaacatcgctactcagttgcaacgtattcagtaatattttgtactaattcagtctaagccccttttccttctcattattctgatgacatggcaaggggctttttatttaaaatcataatgttatctctcccctttaaatcaatcacttagtcaattaaacgggcgtagctcacaaatgtgacattggcgtgaatattgcgcattgattttccctgtcaaaaggactatttcttaatcgtggttgtacataaaacagccactgttttctttccagcagacaagaaatgagggataagaggcatgaagagacagaaaagagatcgtctggaacgggcattatcaagaggatatcaggcaggtatttcagggcgttcaagggaaatttgtccctaccaatcgttagacgcccggtctcattggctaggagggtggcgacaagccatggctgacagggctgtgaccgcttaagcggctccctgtgattcgaggataacctccgctttaggcggaggttttcatttcagagacaagactactcagcatagtcttgcttatcgcgacaaaaaactagccctgccaacgtttcagcaaaatactggcgttaaccccgccaaaaccaaaaccgttagaaagcgcataagtcatctggtgagggcgagctttgtcgctgacaatatccaatccggcactggcaggatctggatgggtcagattcaaggtggcgggaacgatttggtctcgcaatgccagtacggtaaataccgtttccaggccacccgcgcctccgagtaagtggccggttgctgatttagtggaggtgacggctagctgactgtttgtgccaaacaggtgcttgatcgcgttgatttcccccagatcgcctaccggcgttgaggttgcatgagcatttaagtgctgaacctgatcgggagtcacacccgcctgccgtaatgcgattttcatcgctttgtaagcgccgtcaccgtcttccgccccggaagtcatatggtaggcatcagcgctggtaccatagcccacaatctccgccagcggcgttgcgccacgagccagagcgtgctctaactcttccaccactagcaggccagcaccttctcccattacaaaaccatcacgagcgctatcgaacggccgtgatgcctgttccgggtgttcgttaaaaccatgagaaagggcgcgagccgccgcaaaaccggccaggctgactttatcaatggccgcttcggcaccgccgcacagtgcgacgtcggcctcgtggttgcgaatcatacgtaccgcatcgccaatggcctgaacacctgcggcacaggcggtaaccggcgcgccgattggccctttgaaatggtgtttaatggaaacgtggccagcggccagattgaccagaaacgacggaatggtgaaaggagacagccgtttggggccgcgactgtcggtggtgcgaaccgcatgcgcaatcgcggggaatccgccaatacctgaaccaatcacggtcgcggtgcgctcttgttgatcttcggcgattgcctgccagcctgaatgggcaatggcttcatcggctgcagccatggcaaactcgataaaacggtccattttcttttgatctttcggtaaaacggcgcggtcgggatcgaaaccgccttctggatctgctgccagcgtaggaacctgtccaccgactttggttgccagctctcccacgatctcatccggcaaccggcggatacctgattgcccggctagcaagcgctgccagacgatttcgagacctgttcccaatgggcaaatcacgcccataccggtaatcaccacgcgacgcatactcatacaatttccttattcggattcaatggaacgggcagacgccttttcttgcatcaatgcaaggcgtcgcttcacgatatcactgcttaccgggcctgcggcgatggtgacatcctgataaaggataggccgttgggtccgttgatcaagcaactggggctgaatcggctcaccgctgtggcgatcgaccagaatcactgcggccccatccggagccagatgcttattaccccaatcaaacattgccaccaataccggaaaaaaatcgattccgcgttgagtcaggcgatattcatagcgagcggggcgggcgtgatacaaatgtttgtctagaatgccactggcgaccagatgtttcagtcggcgagttagcatggtaggcgaaagctgtaaacttttctgaaactcgtcaaagcgcgacaatccctgaaaagcatcgcggaggattaatatgctccaccactccccaacgcgctctagggaacgggcgaccggacagggcatatcgtcaaaatgggttcgttgcattagctgccggtaacctcacgagtcgagtaaaactaaaatgagaagcaaaacgtcagtcactacatttatagtagtaactatggttcaaaaaaatgccgtttgactggcactgttttcactttactggattacgcagggattgagatgctctctccctgcgcagaaacgtttagaacgcgttagtgtctttaaacaagcccactttcagatcggtcgcggtataaatcaccttaccgtcaaccaatacttcgccgtccgcgacgcccataatcagtttacgcataatgacgcgtttgaagttaatgcggtacgttactttcttcgcttcaggtaatacctggccggtaaatttcacttcgcctacgcccagcgcacggcctttaccttcaccacccaaccagccgaggtagaagccgactaactgccacatagcatcgaggccgagacaacctggcatcactggatcgcctatgaagtggcaaccgaagaaccataggtctggattgatatccagttccgcttccacataacctttgttatgagtaccgccgtcttcggtcatcttcacgatacggtccatcattaacatattacctgctggcaatggtggtccaccggcgccaaacagttcgccgcggccagatgcctcaaggtcttcttttgtataggattcgcgtttatctaccatgttctcagtaagccttattttattgaaggtcgcagattagcgtacacttgtacgctgaacaagtccgatcagccctggttaaaccagttgagccagcgtaatggccaaggtcggcgtcgatcctgtggattcatttgggcaatcctttcctgaattatacctaacaaactggtttgttgttcatcggcataaggcaggccggtcagaagtggtaacgcttcagtgacggaatccacggcccacagatggaattgcccgttctgtactgcttcaaccactgacgggtgcaggcagagatggcgcacattggcgctcggtaaaatcacgccttggctagcggttaatccacgacgttgacaaacctcgaagaaaccttcgattttttcatttacgccgccaataggttgcacattcccaaactgatcgacagaaccggtcacggcaatttgttgattaattggctgttgtgaaagagcactgatcaatgcacataactctgccaaagaggcactgtcgccgtcaatttcaccgtatgattgctcaaaaacgattgatgcggagaatggcatcggctggtcaagttccagctccgcattcaggaatgcctgcataatcatcatgcctttagcatgcagattaccgcctaactcggctttgcgttcaacgtcgacaaattcgccgtcgcccatatgtgccacgcagctgatgcgcgcgggttcgccaaaggctcgcggatggccaggatattccagtaccgaaagaccattgatttggccaacaaccgcaccttcggtgtcgatcagaatctggcccagttcgatttcgtcctgcatccgctcggccagataattctgccgccaatcgcgattatttgcggctacatccagcgagttaccggtaatttcatcttcttcagcatacatggcggcttcggctaactggcgagttaaccattgcgggcagagtggtaaactgccctgatcgccactgtgacgaatggcttgtttaaacaatactggccaagcgtctgcggacaaaggcggcaaattattctgctgtactaacccgttgatataaccgcaccacagcgccatgccttcttcgtccagcaggggcaattcagcttcaaactcgccgtaaatggccagctcacccagctccggttccatatcatggaaatcccctagaccgaggcgatcgccaaccagaaccaaacgcagatcgagaggcatagagggaatatgtaatggtaaaggcttggtttcatcgggagagagccactcgaaacgctgctgagtcaccatttgctttaggcgtagccacattaacggctgcgccagcagggaacgtaccgacagaatcagcacgccgccgttggcctgatggaccaaccccggttgcaagctgaccgtatctttatggattctaacgcaaccaaataattgctctggctcaatccattcctgacataaacaggtagatttggcagcaaaagcctcattgccatgctgagctggctgccagctcacttgatggccatgtaccagataatcaccgcccgctagcgtcggcgtttcatttgccagcaactcattaattgcctgggagagcaggttgagatagtcgctactctcttgcgccttgatcagcataaagcgcggcttggaaagtgggtgacagaatagcgtcaggccattttccaaccggggctgatatgccgcaaaagatacgggagccaactgagtggcggtagcaaacaacgcctcatatggcgttgtgtttggcagcaaagactgccattcaagtcggttattggtcaaagtgttagatgcaatcgtcaaaaagggaaagggcgattatacaagaataacgcaggctgcatatacgcagagtggctgttgtcgacaaggagtgtgacatcctgatatttaagtacaaaaaacagccaaaatgaacgcgatttgcagggggaaatttcctataaagctgttatgcttactgaagttacgcggtcactgaagagatcacgatgaaatatcaacaattggaaaatcttgagagcggttggaaatgggcctatctggtgaaaaaacaccgtgaaggtgaacctatcactcgccacgttgaaaaaagcgcagctcaagatgcgattgaacaactgctgaaactggaaagcgagccggttaaagtccttgagtggatcgatgcgcatatgaatgcggatttggctaatcggatgaagcaaaccattagggctagacgtaaacgccattttaatgccgagcatcagcatacgcgcaaaaaatctatcgatctggaattcctggtttggcagcgtttggcggcattggcgcgcagaagaggacatactttatccgaaacggtagtgatgttgattgaagatgccgaacggaaagagaaatatgccaatcagatgtcatcgctgaaacaagatttacaggcaattttgggtaaagacgattagaaactgaatgagaagcaggcgttatttgttggcgtttcttgcgattctggtttttggttttagatgacgaaaacggttaaaaaaaaaccccgcaatgcggggtttttattaagaagtaaacttaagcctgtggctgagttacaacttctttgatgcctttcacttcgatctctacgcgacgatctggtgccaagcagttgatcagtgcagcacgtggtttcacgttgtcacaggtgttgcctgtaactggatcagcttgacccatgccacgagcagagatcttgtctgctgggatacctttagataccaggtactctacaacgctgcgagcgcgagcttcagacagtttcaagttaggagcagcttgaccgatacggtcagcgaagcccagaactacaacagaaccgtctttaggatcgatagagctcagctgagagtacagttggtccagagcttgctggccttctggtttcagagttgctttgttgaaagcaaacagcacgtcagatttcagagtgaaacgcttagtatcaacaactggagccggagctggagctggagctactggagcgactgcgtcatcttgaccgaaacggtaagaaacacccaggctcagcatgccgttgtctggacgagcaccaacggtagcagcatcaccaatgttgttaacccattggtaatccaggcgagttgcccagtttttggttactgcgtattcaagaccaacggctgccagcggagaaacgccagtgtcgtggttgctagcgtggaagttttcgctaggcacgtttgctttagagtctgcacgccaaaccataccacccagacgagtgtacagatccagatcctgagcaattgggtagctcagtttagcggctagctgaacgccttgtgctttaaatgcgccgttagtaacgtcgcctttgtaaggcatacggccaagccagtcatatcccatttcgaagccaaggtattggttcgcttggtaacctacgaacgcacctgcacccagttggtccttgtgagttgggccgtcgttgctttcgttgtagataccactgccggtaccgacatcatggtactgagaccagcccagtttaccaccggtgtaccaggtattatctttcggtgcggcttgcgctactgtagcgaaaccagccagtgccactgctaatgcgatagctgtctttttcattttacgcctcgttatcatccaaataggcaatgagcttttgtaaagccaagcccttggttaaaattcttcgttaaggttttaacgctcccgttgattcacgctgccagtttaatttggcgttttagagcaaccttagcgatgtaaagtctacaacgtggcgagaaagttacaagtgtgatgtgataaaccgcctgaaaaaaaagcaaaaatgagcaggttttttaacacttttggcataaaaatggtcatttttagaacaatattttatgctgcaagccgcgtaatgactcgctttgcactgatattcagaggttcccatgtaattcacgttaaatttcatgggataaatcctaaatttacttaatgatacaaataagaatgaatttttagcgttggacactgtccttggttcgattttgtgtcactttgcggacgcataatgaacccatatgcatttccctgctcggcagctaagcgaagccttagtcggtcttcatccgttaaatcaggcaaccaaccgagcaccacactgtaatttcctgtctgtagcgctttttccatagcttcaacggtagataaagaatctatctggcttagctgcaccactttatctacgggtaaaccggatttctcaagccataaacggctaagcttctgctgtggtgttaaccatagcaaccagcgggattgtttgcccaattgttgcagcaggggaacgagcagttgaaccactgcggactgattctcactataaacaatttcactgataagtccgctacccacaggggaaatggttcttgttgctaatgtattagcagcaaaagtatgactgttggaattatgaggtttaagtgaatgtgtgcgcatgtgatttcctgcccgtagtgatactgtatgaatatacagtaatgggtgtttgatggaagatcaacctaatttttcaaactgcttcgcaaatttgcgatgaaatttaatgcaaattaattttgtaattggatagtcgatttatattgcgtatttttgcaattagttgttcctcttacacttattgcatcaaaattaggactataggctaatcatttgctaaaggagtagcgatgaagcatttatcagaaaaaaggattgcccaggctcaggatcgttttgcttttctcggcccgattacatttcgttctcaatttggcgggtatggtttgctggctaacggcatcatgtttgcgttggtttctgaaggcgaaatgtatttacgtgcaaacgaacgtaccgaatacacattcaaaacctacgggatgtgctgtttggtttattccaaacggggcattcccgtcacgttgcgctattactggattacgcccgagttatggcaggatgaatccaacctttccgcatttgctcaattggcctatcaaggagcagaagaagatgtcgttaccaaaagcagggaaaccaatcgactgaaagatttgcctaatgtgaccattgctcttgagcgtttactgtggaaagtcggtataaagaatgcggatgaattgaggagtgaaggagcaaaacgcacttatcttaggctcagggccttgaggaagtccttggggatcaatgtcctgctctcattagccggcgctattacaggcaatcatcatgccgttttacctcgtcgaattcgcaatgagctgatggaatggttcgatgatgtaggaatgccggtcagcgcttgttataaaaactgaaggcgatgaacgttcaaccaacgatgagtaacgcgatatgcctttaagtcgtaaccgagtgaagggagtcacaggccgctaaaatatcaacaacctgtgactggcaggtgagtatcaccgcattatttttatgaattacgaatttctctggccaatttgtttatttaatacggcaagctcaggtagcagttccagtaacaatcctacctgctgtaataccagcggttctttgctttcaggatcggggctgaattgcgcgctacgtgccgaaagggcagccagcgctttgttcatgcggatatcgtccaccggttcttcgctaagcgccgcttctacataacagatagcgtcatttagtagctccagaatggctggattggtcagtttctcgcggtgcgcgcctagcgccgagatgtagctcagcatggtgtgattcaggcacagcagtcggaatgccgcctcatgtgttttgcggtcattcttaggctctgcggacatattggaaataaccgaagctaactcagcatcgctattgtgcgcatcgcggcgggcaatcctataggtcaggctgttgtcctttccctgatggtattgcagcaggatggcgtccagatagcggcagttggcgttgaaggtcttgttcaccaccgccggcagatggcggaatttccaatctggccagataaaggaaacggcgacccaggcaatgccgcagccgagtaaggtatcaatcacacgtggcatggcgacctcaaagccttcacctaacaggttgaagcacagtaacaccaaaagggtaataaacatggtggcgtgggcgtactgcacattacggaaggcaaagaacagtaccccggtaatgacgattaaaatcaactgcccttccagagaaggcacaaagtaaagaataggtaagccgatcagaataccagcgagggttccgatgatcctaagagctaaacggcggcgggtggcgttgtagttaggctggcagacaaacaggctagtcagcaaaatccaatagccgtgctgcatgccggtgaattggataaatgcgtaaccaatacagagcactacggacatgcgaaccgcatggcgaaatagggctgactgcggcgtcaggtggcggctgattcggagccagatatcgccccaaccggtaatacggtcgtcggccagacgattttccggcttagcttcttcggccagtacttgctctgattcgataccagcaagctgggcgtcaatggcacgcagatttctaagtaaataggataatgctttaacctctggaaggtttttatgtttttccgacattcgcagaagcgtagcgtccagatgagtaaacgctcgctcaaagcgcgggtcgtgctgatatttttgacgcaagaggatggattgcgataattgctggcaggctctggcctgcatagttagcagccgctggaagcggaacagcacatcgctaaaacgaaatttctcccgcaggctttggtattgcacatgggaggaactggcgcgctcatgaatatcctgtgcgacgaaataatagtgcagtgtacggcgggtgccccgttgcccgcgatctcctttcagacgggttacgagggaaaccttggcctgattcaaggtcgaaaccagttcgccgttggccatggcgacagcgatcagcggctgattgtcattcgcttcgatatcaggatcaaacagattggctttggcttccagataatacgaaagctgctgataacagcgtgccatattgtcctgtagtgggcggatagggaaaatcagatggccagctagcgtcagcaggttgtaccaaacagcccccagcagcaaaagcaacggttgttcataccagatagcgtacatcgatgtacccagcatggtgtaaatcgcgatcagtaaagcgccaaaggcaatggtggcgtagcgttgtccaagcgcgcccagcagaatgaatccgcaggtcgaaaaagtcaggccaatagcaaatagccagggatagggaaagagcaattcaatggaggcagaagcggtaaagaagcaaaccaatgtaatcaataaattgcggatgcgtcctaccagcctgtcgtccagatctgccagagccgcggctacgactcccagagtcagaggaatagtcagtgtgggttggccaagccaccaaggtagcgccgttgcgccagtcagggcgataaaaatacgaacgtaatacaggaagctgctgttatatgcatagcgacgtaaatcagaaacaaaagtgagcacaaaagacccctaaaacgaacaaaacagcctgaccgaattgagcattacctaggctaatcaacatagcttttaggcaaaaaacgaaccttacactcgggcaaaacagattcactcgagcgtaaggcatcattctcaatcagcgttgctgaaagcggcgtttagcattctcggttctggcttgttgcgccatttcaaccgaaaccacccggcggccgactggccataaggctatcgctgctattttaaagttagcgataccgacaggaataccgatgatggttaagcactgggcaatcccagccaaaatatgggaaatgcacagccaccagccaaacagaataaaccagataatgttcaatactgaacctccggttgttagcagagcattacttttttccgggtataattcattgacatggatcgcctcattgccataaggcagaaaggagagcttggtaatttcccagcaagagcgggttaatggtaaggtaacgatcaacagggcgctgaccagcgtagccaccagccaggcgagcgttgtgaagaaaccacctaaaacaaaattcaaaatgttcaatgcagtacgcataatgattaatctgcctgataaaattgaagagccgccatgcgggtgaatctagaagtgatcttccttttcccattattacgcgtttttgacaataacccgtaaactatctgatagctgttgtttaaactcaattattttatttacactccattttgatacgtaaactccctcaatactagttttggcgcaggtatatggaacttaaagcgacatctttcggcaagcatttggctcaacatccctacaatcgggtgcgattattgaatgctggcatcgaagtgagcggtgataaacatcaatatctgattccgtttaatcaattggtcaatattcaatgtaaacgcggcatcgtatggggagaactggagtttgaactgccacagcagcaggttgtccggttacacggcaccgaatggcaggaaactcagcgtttctatcagtatttgttaggcgtctggcaaaaatggagcgaggaaatgagccagattagcgcagaagtgctccaggcccaggtggcttcgatccgtaaaattgaacaacaagataaatggtttaagcattcggatttggcgcaattgcaagaaagcatcaagcaagcatttggcgcgttgccaatgccgatagagcgattaagtgaatttgagctgtgccgcgacgattatgccctgtgcctgcgttggttacagcagggtgcccggagcgttgcgatgcgtaaccgacaatggaccgaccgcgtgctggaacaacaccgcgacttcttccagcaggttgaaacctctcctttgaacgattcccagtgtcgggcagtagtgaatggggaagattcggtattggtattggctggagcgggtagtggtaaaacgtcggtgctggtggcgcgtgccggttggctgttacatcgccaggaagcgctgccggagcaaatcttgctgctggctttcgggcgtcaggctgccgatgaaatgaatgatagaattaagcaacgtttggggacaaaagatattcaggcgaaaaccttccacgcgttggcgctgcatattattcagcagggcagtcgtaaaactccggttatcagtaagctggaatcagacagtcaggcgcgtcgctcgctattgatcaaaaactggcaacagcagtgtgaagaaaagaaagcgcaagccaaaggctggcggcagtggctgaccgaagagttggagtgggacgtgccggaaggcagtttctggcaagataaacgtctggcggcgcgtttgggagggcgtctggaacgttggcttggcctgatgcggatgcacggcggtagccaggctgaaatgattgaacaagccgatgaggaagtgcgcgacctgttccagaaacgcattcgcctgatggctccgttgctgaaagcgtggaaaagtgcgttgaaggacgaaggtgcggttgatttctccggcttgattcatcaagcggtgaatttattggagaaagggcgttttgtcagtccatggaaatacattctggtggatgagtttcaggatatctcgccgcagcgcgcagtgttactttccgctctgcgtaagcaaaatacccaaacatctttgtttgccgtaggggatgactggcaggccatttatcgtttcagcggagccgaactcttgctgaccaccgcctttagtcatcattttggtgaaggagcggaatgtgctttggataccacctatcgttttaacgatcgcattggtgagatagccaatcagtttatccaacaaaatcctcatcagttaaaaaaaccgctaaacagcctgagtaaaggcacgaaaaaatccgtggtaatcctgccgcatgaacagcttgaggcgctgctggataagctgagcggctatgttaaacatgatgagagaatcatgattttggctcgctatcatcatttacgtccggatattttgcagaaagccaaaacgcgctggcccaaactgaatatcgattttatgaccattcacgccagtaaagggcagcaggctgagtacgtgattatcgctggtttgcatgaaggcagcgatggattcccggcggaagccagagagtcggtgttggaagacgtactcttgccgcaaccggaagattttcccgatgcggaggaacggcgtttactgtatgtcgccatgacgcgggctaaacatcaagtgtggttattacaagacagcgatcgcccttcagtctttgtcagccagttacgcgatcttggcgtgtcagtacagaagaaaccctgacaggaaatggttgcccccgcaggctttggcccgcggcgggcggattatttcagacgatcttgcaggtagcgctggtaatcgggaatagcaatctcaatctcccgatcgaatagcggcgagcagacgagaaaatcagcggtagaacggtttgtggcgactggaatattccacactgtggccagacgcagcagcgcttttacatcgggatcgtgcggcaccgcatttaacggatcccaaaagaaaatcaacatatcaattttcccttctgaaatcagcgcgcctacctgctgatcgccacccattggcccgctgagcatactgcgtaccggaatccccgtggcacgttgcaccagatttccagtggtgcctgtggcataaagttcgtgtcgcgccagtagctctttgttgccttcaacccaggcaagcagcgattttttacagtgatcatgagccacgagggcgatatgtttcctcgccgcaacggttcgtgtagtcagttccatgaaaatccttaaataactgaggtttcccgacagattactgaaactggaatttggtgcatagagggagcgcaagaaattgcgagaagggattgaaaaatacgatattcacatcagattctgccgcattcgacttttggccgctttcattggcgagcctgcgcgagagaatagggggttatcctgacaaacacgtgagtcaacagcgcctattgttttgccgcgtgtttcctggcccaaagcaaaaaccgctgttgggtttctttatctgcctgcaaataccaatactgtagcatttgctcagaaacgttctcaccgttcaggcgcgtagttttgtcggcgatgccgttgcctgctgcgggtagcgttgtaccgggcaccgcgctaacggttgaagggggaatcgcggcgaaagagggaaccgaggctttatgattgcctaagttatagattgccatgatgttttccagagaagcgctactggttaaatcatccggatgcagcatatcagaacgtaccggcagaatatgagcattgtgatcaatcagttgatacagcgggtgatgagaaaatttctgtccttcttgcgtattagtaatcgttggaaggtggatggcgacagatttcacgttttgggtattaaacaccacgatcagcggcggtgaggtgtaaaacatttgggcaggtgtgctggacggaagatttttagtaactttaaacagtatttgatgctggccgctgttcagctccagactttccgcgccttttagcaaagaaccggacatgtttttaccgtcaacgaccagcaagtcaatctcaggcgacagttttaacgtcgttgccagcgccgaaccgctagcgcaggcgattaaaactgcgataaccataagaccgattttcatgttccactccttttgcccaatctttgtattgtcagataagcaagataatgcgccaaagattatccctcacatcattataattacatttcgacactttttgtattatttgcttatgtttatatttttgaatttaaaaggaaaaaacaatgtaatttaacagaaaatacattgatcaaggttaaacgaagtcaattgtcggctttcttttcagcctctttggctgatgatatacactgagataatcgacccgatcccgcgctcttttgggacacgaaccggtgaaataagttctatttattatgcacatcagaggaactgaaatatgcatgacaatgatattgctgaggtactcaaaaaaaccaaaactatcgcattagtcggagccagtaataatcctggtcgcccaagctatggcgtgatggcttacctgctttctcagggatatcaggtgattcccgtgagtccgaagctggcggggcaaactttattggggcaaacggcctacggtcaactggcggatatccctcatccggttgatatggtggatgtgtttcgtaacgccgaagcggcttacggcatcgcgcaggaggccatcaccattggcgccaaggtgttgtggttgcagattggtgtgattaatgaacaagcggcggtgctagcggccgatgcgggtcttaaagtggtgatggatcgttgcccgaaaattgagattccgcgcctgggtttggaaaaagcctaaaatcattgcatgcgctatctcaataagctgtcttggcgtcagggcaaggaaatggaaagaaacgataaaaaaacccaacgctgaggttgggttttcatcaggtttaacgtttaggcgataagccttagttccgtaatctcggtgcctgtaactgatcgcgaatagaaaccgccaattcgtctaatgaaggttgatcaggatgagcttcctgtacttcataggccaactgagcctctgccagataagtatgtatcgcctgaccgcgatcgtcctccataacaacgtgataccaaggcgctaatcgcagagtatcgctattaacgacgtcttcaggttgaggttgatccaaggaatattcgggatctatatcgataacaacacccaaataaccgagtagtttatggcgaacttgctggccaataccgaatttgctggcgatcatagtaacctcctgaaaaacatttcgctgccttctgatatgagggcagcgcaggacatttcaagttacatcaccttcacgttacatcactcgacaggcaaaacctttcagatacaaaccttccggataggttgcgataaccggatggtcggccgcctgacggaactgctctacaaattgtatatcacaacctgcatctagcgcggcatcggccagaattttttggaacaaatcatttggcattaatcctgaacaggagaagctcagcaaaatgccgcctggacgcagtaactgtagcgctaacatattgatgtctttataaccacggcaagcgctggccaactgatttttattttcgacaaacttcggcggatccataatgatcatgtcgaatttttccccttgcgtgcggtaattccgcagcagttggaacacatcatcacgaacaaattcggctttgctcagatcaagctggttcaattccacgttttgtttagcgatatccagcgccgcctgtgaggtatccacgctgataacctgctcgcatccgcccataagggctgaaacggcgaacgcgccagtgtatgagaaacagttgagtacgcggcggcctttggcataattgcgagcggccaaacggctatcgcgctgatccagataaaaaccggttttatgaccctgctggatatcgaccagcagtttcatgccgtgttcctgaatcggtagcagtgctggtggaatatcccccaaaataggaccttgggtcagttccataccttcttttttacgaaccgatacgtcggaacgatcgtaaatggaacactccggatagcaatgctgtagcgcgttgatcaaggcaccacgctggtattcagcaccggcagacaacagttgtagaacaaagaagttttggaaacgatcgatggtgacgccaggcaaaccatcagattcaccggcaatcaggcgatagctgtccagaccgtcgcgcttcgcaatccagtcccgccagctttgcgcttgctgtaagcggcggataaagaaatcgttgtcaacggcttcgtcctgttggaaagtccaaacgcgggcacgcagctgtgactctggcgaatacgcgccacgggccagccatttacctcggctgtccataatatcaacggtttccccaggaagcggtttgccttcaacacgttcaacggcgccagaaaatacccaaggatgacggcggagcagggacttttcgcgtcccatagcgagaattacacggttcataataatcttttataatcaattcgttgggattgataacatattatcaatcaaaaattaggccacaatcatatagtaatatgagatgagtcactactttggcggatgggaacgctatgagtgtggatgtattaaattttaatatagaaatattaaaatggtgagatgaaagcgtaatttatcactcaagccggtgtaaaagaaatgtattaacagatttttattccggcttaagccatttatttttatgataaatcaccgcaggattgcctttttgcttctgataacaatcggtggttttatctataggctttgggtattaaggaatatgttcccatttgatatccaccacaacgccgataattttacagtttccgttgataatagtcggcggatgatgcgggtttaatgccttaaggtacttacgtccagcatcggtcataaactgtttgaacgtcgcttcgttttcattttccagcttggccaccaccagttttccgctgaccggctccttctctggatcgactaaaataatcattccttcgggcacggtaaaccccgttggcgcggtcatggagtcacctttcacccgtagccagaaagaaccggggctggcatttaccgtggtgtcaggccaaatatcaatttcatctctgcgatagggttctaccgcttccagccagctcccggcgctcacccagctaatcagcgggaaggtgccaaccgtagatttttgcccaagataactcacgttattcgaattggcattctctccaagcagggcggcctctttggctaacgtaggactgaaatcggcaatagagacctgaagatgtttggcaaatgccgccgcgaccttggtgtttaatggattccggccgttcaggtaatggccaatcgcgccttggctgacgtcaaggtcatcggctatcgcctgttgggtgatatgcagcgattttttctttgcctcataaagagatttcaaacgcatcgcgtcttcgatctgttcgggcgtgagcggttttttcttttccattcactcattctaataccagagctattaaaataacaataccgcagatattgatttgataaatacttgcggtattattaatgggtatttattcatacggagaagacctgtgaagcaaacagcgtctggcgatgatgcaagtgtcgtgtggtttcatagggtcgagcggcgtttaaaatgggtaggcgtgttgttcaaccaggttagcgacgtgataccgacattgctggattccagagtgacggagccaaatagctatggacgatagtctgcgaggcaaggtgattggctgagctaacgcgacaagagcgttgccaacacaagggtttacgaggagtaaggatagggaaccctgaccgctagtaagaactgagaacgttgcggtccggcgtagggatacgtcaaggagcggcatagatttttatttacgtctatctacggatgggcgtgcaggcgaggaaagcaatatgaacctggaatcagcgacaaagtatctattctgtaaatcacaatctttcaccgatagccctggtgcgacgggcgatatattgaccggcgccgatgtgatgggagctttcggcctgtgtcagtccaaggctgaactcgggtttaaagcctattcagggaagctgggtttaagtgctggtgatgccaaagatgcgattcagttactcactcaatatggcatgacccaatgcgataaggtggcagccttacgtaagctggatggcagggttaaagtgaaagtcgtacagaagctggcgggttttgcctatcaggattattgccgcagcgcctcaggcgttgaggaatgttcttgttgtaaggggaaaaggttcgttatcgatagggtagcaacggcgaaagatcgggaaaagagagcctatagccagcctactcaggttatttgcagccagtgttggggaaaaggcgtggtttccgttgcctgccgggattgccgtggccgcggtgtcgttgtggatcaaaaagagaccgagaaacagggccttccagtaaagcgcgattgtcagcgttgccgcggtcgcgggtacgagcgaattccggcatcaaccgcatttcgggcagtgagttcgctgactaacgccatcagtgccgcaacctgggataaaagcattaagccattttacgattcgctgattggccagttggagcaggaagaagtccgcgccagtaacttattgagtaaagcaattaaatagctaatgaaaaaatagtgaattattttatcgttagctatttatttttccgaaaattggggtaaactgcttctcatagtgggctacttataaaggctcatcagagaaaggcctcgggttaaccaccggggctttttgcatttataggtacttagtgaatatcattgtatctcgcagctcatctgttttcctgatgcagactgaggtagatatattaagtaaagcggtgatcaccctgattcaccccaaatatcaaatccagcatctccaacggatgccaggatgagtcaatcaaggcctcgcttctgcggggctttttcgtatctggctctccgtcaaactccaacgtctacacgcccccgtaacgcgaggagccgtggcggagagctattcctgttgacacctgaatcttaaaaatgcccagccagaccggcagggggaggaggctatgcgaatggataaatatgtcagtgagttgtcttgctggcttggtggtttgacggccgcgttgggcgagctttcgttgaacgaatgggcaattatcatcggaattgtctgcaagattggagccgttggcgtgaactggcactacaagcgaaaagaatttcagttaaaggagaaatctaatggctcccgctctacgtaacaaacttctggcgtcctccgctggcggtgcggcgctgactctagctttggtgggcggtcatcacggactggaggggcttgaatatacggcttattttgacgtagttggcgtgctaacgctctgtgatggtgataccggtaagaaaatgagcgctacagcgatggggagtgcgataagcggcgaatgctgcgaataaataggtgtttaattaataccttaggataacaaccgctggaggcgcaggaagccctctgttcagatttgctcatgcaagtcttactcaacggttagggatgagctaaccaaaatcgcagggatgaaaacccttctcaaggaattgagatttcgaactttatcactcatctctgctggcttagaccggtttttttatagctaaaattggagtattaccttggtttcgatttacgaaattgcgcagggatctattgtacttcaacgatggccaaccgttcgataatcccacagggcgttggatagatctgcgcttgactatgccggaattggatctgggaatacgtcaataatattaattgttctgactgtatttggcgtgagacgagcctaaggccataatgagatggttgcggtgagataacagaaaagtagcgataataagtttggtatcggaataaagtttggtatcggaatatatgcactaaaaataaaaatgagggaataaatatgccaaaagtctgtatcgcggcctatgtttacggtgtggttcagggcgtggggttccgtttttgtacccaacatgaagcggttagtcgcggtatcaccggttatgcgaaaaacatggatgacggtagcgttgaagtgattgcctgcggtgagtcagaatcagtggaagagctgatggcgtggctgcggcagggcgggcctcggggggcaagagtggatcgggtgttgacggaacccagagcggttgaagtatttgaaggcttcaagattcgttattaaaccgccggccattaggccggtcagtttatgcagtgagtaacagatctgaacgatcaaatacattttaccggtttaggtaaacctgcaatcttggtggcctgtttcgccgggccttttggaaaaaggcggtagaggtagcggctattgcctttctcctcgccgtatttttgcgccatggctttgaccaacatgcgaattgctggcgaggtattaaactcctgataaaacgctcggacaaagcgaaccacttcccaatgcggctcggttagggtgatgtcttcctgcgcggctaaaataggagccagactttcagaccagtcatcgctattcttcaaatacccctgagcatcggtatcaattatccgaccttcaaactccaacatacggcctcaattatgcaaaaaaccaaatcagcggttaatttagcaaatattcgtcggtatcccaaaaatgtctgcgataaacaggaaagtggcagtggactgcaaagataaaccgcaatgcgccatttttcatcaagctgacgataaattcggctttcgttgccgtggtgacggatttttgtccaattaaaccaaatcaggctttacaagccaggtcgcgctgtttatagtgcgcctcattgcggaggggtggccgagtggctgaaggcaacggtcttgaaaaccgtcgacgggaaaccgttcgagagttcgaatctctcctcctccgccattcacttcttggttatctcttggttttactctttattgacctctctaaaatccaatatttcctgattgaacgttacgatctatttttaccgtaaacgcgtgtttgcatttcatcatttgttgtcgctatgcacaaatattcccttcaaacagaagactgttttatttgcttagcggataatctcgctatcaatacctgcaataaaacattcacaataacattttcacaataaaagaacgctactgcctgtttgaagggaaagcgtcatgcggctgttatatctggataaaatcgactgccccgccgtctaattggtacatggctccgataatcttgatttttccttctttttccagcttattcaaaatatcgctgcgctcacgaatagtttttatcgtgttctctacgttagttttcgctaccgcatccacgaaagcggcgttattgcccgagcggtcgccgctatattctgttgccgcaatggccggttttatttgtgccagtaacccggttaaattccccagctcaacattatcaatggctccgcggatagcaccgcaggcggtatgccccaataccagaatcactttggcaccggctacagcacaggcaaattccaggctaccgaggagatcgttattggcaatgttgccggcgattcgtccattaaatgtttcaccaattccggtatcaaaaacaatttcagccggagcgcgggagtcaatacagcttaatatgaccgccgagggaaattgcccactggcgctggcgcgtttttgcgctaaataatcgtgttgctgcatttttccgtgtcggaaacggatattaccgtctttcaaaccttgaataatctggtctggagtgagtttatctctttcttctttggtcagcgctgcggcataggttactccggggctggttaaaccaatggcaccggtgatgcttagtgctgacatgccaatggccgcttttaataatgaacgtcgtttatttggcgggccgttctcaggatctctggtaggaagtgattccatttttattacctcagggcgaataaaagcagagaaaaaatcagatgtaactgtatgtcacccagaatgggctcctataaatgtagctcattatttgtacggcgctgtcatgtcagtttactggctcatcaattgcacaaattcccgcgcggctttatttagcgactgattctttagccaaacggcgtgaatcggtaatttcagctcgtttttggtatttttaaaatgcagttgtttcaaatgtccttgttttagtaagggttcgatcaatgaaaaaggtagattgccccaacccaaaccggcttctaccatgcccaatgccatagccagcgtgtcggttcgccaatagctgcctgcaaccagcggacgagtatcgctgatagggtggctcatgctggcaacgatgatctggcgaatggtgactaaatcttcaatataaagtgcatcattggcattttctgccgcccagtggcgagctgaaatagtggcaatcaatgattcactgcccacgtattgaaattgttcctgcacgttgatgcttagcccgccgaaggccagcgccacgctgactctgccgcagtgcaacatatgtaacacatcatcctgcggcgcgctgagcacctcgatattcagcagaggataacgttgagacagaattttcaacgccgccagaaccggtgttttatccacttccgccgccatagctaaagcaaacgtgctttccaatccttgagataattcgacggcgtgaacccgtagctgctgaagctgctgagcgattattcgcgcctgtggctccagtgctaatgccaatggcgtcgggattggttcgcgggagcgacggtcgaacagcggaaacccaagctcggcctccatattagcaatgcccatgctgaccgctgacggtacgcggtgtaaggctctggccgccgccgagaaggaccctcggtcgataacggctaaaaataactcgatattttcactggaaaaattcattcgtcctcctatcagtaaaactgataatagctaacttttaatgtcagtacgaatgacgatatcttggcggccttaatcgatgggcgacggagattgctcatcagcgaataataatgaggtggttatgcaagggttaaaaagaaagctggtgtacgtcacggcatatgaaattattgggctggtgatttcggctttggggttggctttgctatcagggacttcgccgggaaatacaggcccgctttcggtgatgattacgactatcgcggtgagttggaactttgtttataactatattttcgagttttgggaaagccgccagctcagccggacgcgcacggttaaacggcgggtgctgcacgccattggctttcaactgacgctggtggtgtatttgattccgttaatcgcctggtggatgaacatcagtttgctggaagctttctatctggatttggcgctcattgtgctaataccttgctataccttcatttttaacgggttgtttgatcggattttcggtttgccaagttctgccatttctattgaaacggccgcggcaaattagccgaatgatataaaaaccaacggagagaaaagggcagggtttgcaaatgaccgctggcgacaacaatcactgccagcggcgttaagatttttatcagatagaattggcggctgagaaaatatcagccgctaaaataacggtcaggctttctcggtgataatttttacgccaactttagtgacgcggtcattatccatttcagcaatagtccaggtcaggccatcccattcgatctggtcaccgataaccggttctccgcccaataaatagatcacaaactgacccaaggtttgctggccatcaattccgtcttccagatttaatccataaatattagagatatcattgagtcgtgcatcagcttccaaaatgaagtcaccgaagaagcgctcatccagagtgatagtaggcgattggctaaataacttacccagcgctggcaaatcgtgttcctgaccgattacacacagaatatcgccttctttcagtcgggtgctaccggttgggtgcagtaagtctttaccgcgaaataacgctgcaattcgagtgccccgcggcattttcagatcgcgcagcgccgcaccaatgcaccatttttccgagctaagctgatagatgaactgttcccattgacggttcatatcaatatctagcccgacgcgggaaatcggtgccagagctgggggaaccaccagtttggttttcctggccgcaaaggacaaactggtgccttgtaatagcaaagaaaccagcaccacaaagaaagcgacgttaaagaataaatgggcgtttggcaggccagccatcattgggaataccgctaaaatcaccggcacagcaccgcgcagacctacccaagagataaaaatacgttcacgtaggttaaagctacggaaaggcagcagcccgataaataccgacagcgggcgagcgaacaaaatcatccacagggataaaatcagcgccggaatggcgatcggcagtaaatcactcggattgagcagtagccccaataccaggaacatcccaatctgactgagccacgctagaccgtcaaaggtttgcaagatcccggaacggttgcggatagggcggttgcccagcatcagcccacacaggtaaacggccagaatgccgctgccatttagcgcagtggttaacgcaaaaatcatgataccgccgctgacggccagtagcggatatagaccgttggctaactcaatgcggttaatcagcagcagcagcagactaccgcccagcaggcccaggataatgcccagcccgaactgttgcagtaaatgtatgatgaacatccagcttaggctggtttcgccggcggaaatcatcgctatcagcgtgatggtcaggaagaccgccataggatcgttgctgccagattcgatctccagcgtagcgctgacgcgttcgtttaacccttttccccctaatagtgagaaaacggccgctgcgtcggtagaacctataattgcgccaattaacatcccctggatgatatccagatcaaatagccaggccgcggccagaccggttaatcccgcggtaatcatcactccaacggtcgctaaagataacgctggccataaagctacgcggaatgatgaagctcgggtgcgcatcccgccgtccagcaaaatcaccgctagcgccaagttactgaccagataggcggccggataattatcaaaaggaataccgccgataccgtcaccgccggccagcatgccgatggcgaggaagataactaaaatcgggatacctaaacgggatgagagtgaactgagtaagatacttgcgcccaccagtactgcgccgattaaaaagagactgttaatagtggtcgcgtccacggtgggggatctcctggtttatgcataaatggcgggttatggatgaaacaagttaattatacacagaaaagcgcagttaaaagctaagatatgacctaattcaaggtgttaaatttgtatttttgaactatctctctggcccaatcgggaaaaaaaagtgttttatcccattgaggaagaattaagcggagctgagcgaggaaatcaggagcagaagcggctcacccgtgccgatggtgcagcgggtgagcacaggcaaagcgttatgcccgatcgagggtgaccagagtgcgtttgactaattcggtcactatggcgcgttcggggttcggcacttctgaaaaggtcagttgtgaaagctcattgaccaacacgctgcgatcttttccgttaatggagccgtccaacgcgctgctgagtcgattgaccaaggcaaaaagggtggaaaactcggcgctgatatcggcatcattcgtcaggtttttcccggtagtgtctggtgtactcatcacaaatcctctgtcatatcactgcgagcgaagcttatcccaatgattgttgctcggtaagaatgcccgattaacgggcatacagtgaggtgttgctgccccatcttgttttgcaaggggtagacagtgtaatggttttaagtggttaacgatattgccacaaccatattacttggtaataacattatgctgtgaggaaacagtgctggctgttttaccggaaaacaagaattttagcagcggaatacgtagatgaatttcgtacagcaaaaaggcgacagggcagacaaacagcaggcccactaggaagcccaaagcgttattctgaatatgcggcgcgataagagcgccgtagatcaaggttaacggatgatgcaccaaataaatgaacaacgacgcgttaaccagataggtaatgccggacgatgaggcgttaagcagacgataacccaaagaaaacaccacgttagtcatggtgatccccatcagcgctttgataaggatatccagctcgaaggaaaaataatccgggttaaacacttgttgattaatacaataggcagccaataggacaacggaagcgattaatgccatcggtgaaaactttagaaacacttcttttagccaaaggtatttaaaagtcatggccccgagaataaagaaaggcgcataaaacagcgtttccataaccacaaaattaaaaacactattaaagagtaattctggggagagtataaatattattctacgaaccacagaatataataaatagaagagaaagaaaaacagtgagattcttcctaaactattcaatttattaatcctaccgttaagtgattggttgatatttttaatcttattgaacaggtaaaggccagctaaggtcagtaatgccaaagttaacaaaaaccagaggtgggaaacgccttcccaaatagcaatatttattttttgataaagtgtaaaagaattccactcctgtaatttatttgtatagtgtttaagcaaaaaaaaattgcggcagggtaatcaatggaatggcggtgattaatggaatagccacgcgttctaggcgaactttcagccagcgccgccgctcatagcgctgatacagcataaaagagaagtaaccggagataacgaagaacacctgcatgcgaaaggcgtggataaagtcattcagcaaggttagagacggcgacgagatactgctgtttactgcccaatggtggctggagtaaatcagcgaaagatgaaaaggaatccccagtaacatcaaataggcgcgaatagcgtccaggaaatattctcgttgtttagtacttttcttcatagatattcgctagttgttataattgagagaataacgcgcttattttatcggcactggataaggcggaatgtaaaaccctactataaggtttattatttttccatagcctattgcaatgaggcttgctaggcttaatgattagttcgtcgtttaaacaatagccataaacatgaaatcaggatttatcatattgtcgccagacaggataatccattaaaatggatttaagaatttaattacccgtaaagggggaattgtgccagttaatattttatcgaaaggccagagtgtgaatcgcgctaaatggctgagtgttgctattttgttatctttattctcttgttcggtttcagcttttactttggatgacgtggcaaaaaaagcccagaatctggcggataaaagttttgatgctcccaagagtaaccttccttcgcaatttcgcgagatgaaattcgccgattatcagcaaattcagttcaatcacgataaatcctattggaataagctgaaaacaccttttaagttagagttttatcatcagggcatgtacttcgatacgccggtgcaaatcaatgagattaccgccaaaagcgtcacaccgattaagtacagtccggattactttaattttggttcggtaaaacacgatcctgactcggtgaaaaacctcggttttgcaggtttcaaagtgctttatccactgaataaagccgataaaaatgacgaagtcatgagtctgttgggtgccagctatttccgggtgattgggaaagggcaggtttatggcctgtctgcacgcgggttggcgattgataccgctttgtcatccggtgaggaattccctcgttttcgcgagttctggattgaacgacctaagcctaacgacaaacatttggtgatttacgcgctgctggattccccgcgcgctaccggtgcttaccgttttaccgtttatccgggccgagataccacaatcgatgtgcaggctaaggtattcctgcgcgacaaagtcgccaaactgggcattgcaccactcaccagcatgttcctgttcgggccgagtcagccttctaaggtattgaattaccgtccggcgctgcatgattccaacggcttatctattcacgcgggcaatggtgaatggatctggcgtccgctgaataatccaaaacatctgtctatcagcacctataccgttgaaaatccgaaggggtttggtttattgcagcgtggccgcgctttctctcaatatgaagatttggacgaccgctacgatctgcgcccaagtgcctgggtagaaccgcggggcgattgggggaaaggcaaagtcgagctggtggaaatcccaactgcggatgaaaccaacgacaatattgtggcgttctggacgccggacgtactgcccgatgctaagcattcgctggatcttaattaccgtctgcactttacccgcgatgaagacaaactgcattctgacaacgtgggttatgtcaaacagaccctacgttctaccggtgatgtgaaacagtcgaatttgattcgcgaaccggacggcagcgtggctttcctggttgattttatcgggccggtattaagctccttagatccgaatatgccgctggcttctcaggtcagcgttggcgataacggtgagctgctggaaaacagcgtacgttataacccggaaaccaaaggctggcgcttgacgctgcgggtcaaagtaaaagatgagaagaaaccgatcgaaatgcgcgcagcgctggtcaacggcgacaaaaccctgacagaaacctggagctatcagctacctgccgatgaataagtcaactcagagtccattacaggattacctcgccgccttgcccctgactgttgagcagcagaaggcattgcgggcggcgttgcctgataacgataaagacgcgctggcccagttgcatcaccaactggcggcgggtcagccggaaccgcacggcgcggcggataacgatgccgcactgtcgtcggttaaggctcgcctgttggctggctggccagatgcattgcagggcggtaaaaaactgtccgtggatgcagaagggcgtactgttattagcgccacgccgccgatcgtgcgctcgcgcatgttcccggaggcctggcgcaccaatccggtggcacgcttttgggattcgttgctcggtcgcaccacggtttcacgttcggctacgccggaacaggcagacgccgagcggaaatggcgcgcggtgggttcaatccgtcgttatatcctgctggcgctgatattggtacaaaccagtattgccaccgtgtatatgaaaagtatcttgccttaccagggctgggcgctgatcgacccgatcgaaatctggaatcaaaactggcaacaatcggtgatgcagctgctgccttacctgttgcaaaccggcattctgattctgtttgccgtcttgttctgctgggtttcggccggtttctggaccgctctgatgggcttcctgcagctgcttattggcaaggataaatacagcatctctgccagcgtagtgggcaatgaaccgctgaatccatcccatcgtacagcgttgatcatgccgatttgtaatgaagacgtagagcgggttttcgcgggtttgcgagcgacttacgaatcggtggcggcgaccgggcaattggaacatttcgatatttacgtattaagtgacagctacgatccggatatctgcgtggccgaacaaaaagcttggctggagctgtgccgggatgtcgatggccacggcaagattttctatcgtcgccgtcgccgtcgggtgaaacggaaaagtggcaatatcgatgatttctgccgtcgctggggtggtcagtatagctatatggtgattctggacgccgatagcgtaatgagcggtgagtgcctgacggggctggttcgtctgatggaagctaaccctaacgccggtattattcagtctgcgccaaaagcctctggcatggatacgctgtatgcgcgggtgcaacaatttgcgactcgggtttatggcccgctgtttaccgccggcctgcattactggcaactgggggaatcgcactattggggccataacgccattatccgtgtgaaaccctttatcgagcattgtgccttggcaccgttgccgggggaaggttcgttcgcaggttccatcttgtcccatgacttcgttgaggccgctttaatgcgtcgggctggttggggcgtgtggatcgcttacgatttgccgggtagctatgaagagttaccgcccaatctgctggacgagctaaagcgcgatcggcgttggtgccacggtaacctgatgaacttccgcctgtttctggtgaaaggtatgcatccggtacaccgggcggtattcctgaccggcgtgatgtcttatctgtctgcgccgctgtggtttatgtttttggttctgtccactgcgttacaggtggtgcataccctaatggagccgcagtatttcttacagccgcgccaactgttccccgtgtggccacaatggcggcctgagctggcgattggcctgttctctaccactttggtattgctgttcctgccgaaattgctgagcatcattctgatttgggccaaaggggcgaaagaatacggtggcaacattcggctgctgttttcgatgctattggaaatgctgttctcggtgctgctggctccggtccgtatgctgttccatacggtatttgtggtcagcgcttttctcggctggtcggttcagtggaattcaccgcagcgggacgatgacgccacgccgtggagcgaagcgctggtgcgtcatgggccgcagctgttgttggggctgatttgggccggtggtgtggcttggctggatcttcgtttcctgtggtggctgtcgccgattgtgttctcgctgattctgtcgccggtggtttctgtgctgtctagccgcagaacgctgggtatggccagtaagcgtgccaaactgttcctgatacccgaggaatataatccgccgcgtgaattggtcgcgaccgaggaatatcttcagcttaaccgccagcgagctttggccgacggcttcctgcacgcggtaatgaatccgtcttataacgcactggcaagcgcaatggctacggcgcgtcatcgggcgaaagagattatcgagcacgggcgagagttacaggtgaatcaggcgttgagtcaggggccagcgaagcttgggaagctgcaacgtttggagctgttgagcgatccggtcatgattgcccgtctgcaccagaagatttggcagcagccagaggcttacgcacagtgggctgatttttatcagcacctgccgcgtaacccgcaggccatgccgagctaatcctgcggaatatctataagttataataacgggcaatgtgttaggcgcattgtccgttttgccttataaatacgcgctgatttttgcgcggatatgccaaccgaaatgtggttaaaatgaacgaccttagacaaccattgactacctgaagagcctgataccgtcgtgaagaaaacattaaatattggactgaagaaaagcctgcgtttgctgctgattctcacgggtattgtgacgctctccggttgcggcagtattatcagccgcacggtgccgggagccgggcacggcaatcaatattatccgggcgtacagtgggacgtcagagattcagcatggaaatatattacggtactcgatgtacctctctccatgattgttgatacctttatgctgcctttcgacgcccagcacggcccttacgagtaacgtcaactctagcttcttgttgggaaaaccagcaagttatagcctttttggtgataggtaaagtttgccaccggcgtcatatgtaacccttttacatgcaccgcgaatgaatgtggattggcatcgtctacaaaagccgctccgacgtcataattagcctgagtgtgttgctttacctcggctaatagttggctaacgatgccctgaccgcgtttattctgagcgacgcacaccggcccatagagaaacactcgcagctcggttagcggtttaccctcaaaacgttgctgcctcagggcttccagcatggcgtcgaccaccggcggtcgcggtcgggcatcggttttcatcatgcagacaaaaccagctacttcgccattatcatcttctgctaccaatatgcccaaatcattatttatcgcggctaactgtttctcatccatgcgggaaacgataaatccctgctttttttgctcgtcactcaagttttcagggatgttttcctgctgtaattgcaggattgccgaatagtcattaaggtgagccagtctgatcttcatcattaaccacgctttttaagttatttgagttaactatgctgtttgggggcgggagaaaatcatgttaccaagtgatgcggtcatgcgcgtagccagaccgacagataatcttgatattatcactgaaatgtatcgtttggggttgaacgtgctgggcagttttgcagaccatcagggttttgatggtgtgattttgggtcatccgcatcacggctatcatctggagtttacccatcatcgcagcacttccgttgggcgtgcgccaacggcagacaatctgctagtcttttatcttccggatccgaacatatgggcgacacaatgtcagcaaatgctcaaagccggttttcaggtggtggagtcctacaacccctattgggacgaaagtgggcaaacttttgaagacattgatggctatcgcgtcgtgttgcaacaacgggcgtggccgctgtaaacggtggtgcaggtgagcgggcagtaaaaagccagccgaaaataaggctggctttttatcaagtctattccgacaaattacgcagttttttcagcgccttgggtgttattcatcatgcgacgaatcggcacaatcagcagaatcaggatggcggcgcagatgaccagtgcgatggagcaacgggcaaacagcgttggcagcatatccaactgatcggcttttacgtgtccaccaatcaggcctgcggccagattacccagcgcggaagcgcagaaccacagacccataacctgaccacgcattctgtccggtgctagcaatgtcatcgtcgccagcccgatagggctaaggcagagctcacctagcgtcaacatcagaatactgcctaccagccagaatggagaaaccccttcaccggtggccagcacatgctgcgctgccagcatcatcacaccaaaaccggcggcggcgcacaaaataccgatgacaaatttggtaatgctgcttgggcgaatgcttttcttcgccagtgcgggccatgcccagctgaagattggcgctaacagaataataaataaggcgttaattgactggaaccatacggttgggatttcaaagcccatgaccatacgatcggtgtaatcattggcgaacaggttgaaagacgtcggtttttgctcgaaggctgaccagaagaaagcggcggagaccagcaggataaagcacaccagcagccgagctttgtctttgcggcttaaaccggcaaaagcgaaaagatagacgaaatacagcgttaccgacgcggcaatcaggtacaccagactgctggcgaccagtaccggattgatttcaatcacgccttgagccaccagtgtgactaccgccgccaatgccaccatcgccgcgcagacccatttaccgacgtttttacgttgaacggtcgggctgttccaactggagtccatgccaacttcggcatcgtagcgagtcattgatggaatcacgaacatgcggaaggtcaataatgccaccagcataccgacgccgccgataccgaagccccagtgccagccgtgggtgcgtaatagccagccagagagcagcggggcaataaaggaacccatgttgattcccatataaaacagtgagaaaccgccgtcgcggcgcgcatcaccgggcttatataaggttccgaccatcacggaaatacaggttttgaacaggcctgttcctaatacgataaagaccagcccaataaagaacatgtcattaccgaaaaatgcggataaagcgatggaaaggtggcccatggcaatcaggatagagccgtaccaaacggcgcgctgttggcctagccagttatcggctagccagccgccgggcaatgaagctaaatacaggctaccggcaaaaataccgacgatagcggaagcattttctcgcggtaaacctaacccaccgtcataaaccgtagcggccataaacagaatcagcagcggacggatgccataaaacgagaagcgctcccacatctcggtaaagaatagcgaactcagaggataaggatggccgaagaaagtccggctattgttggtattagaggattgcataaagtcttcccatagaaatcgcctgttaaggtcgggctgttgtgctgtggtatgagtgattcaatacgccttattctcctgttaatgccgtccgttatcgttaggttatcgggcagtcactaatttcatgaataatcgatttaacactctctataataggatttaactccataataacgtcattttggttttctaccgtgcttatatcccattatttagacgaaaagtcgatatacatctcgttttttagatttatatctgtgggtggatgtggatttttatgacgaaattatagtgcaaatttcgaggctgataatgagatttatctatttattttcaactagttagtcttttttctttagagtgagcttacccctttttttgaacgggtaaattattttttactggaaagagaggaaaatgacagttttggggagaataaggatgatagccactttttaagtgggtataagtgacatttataagagaaaagtcagcgataaactgtgattttaatcacagcaaaattttggcatggaggagggaagatttgcgcttatccggggggagttttagctatcttcctgacgattggccgattgtttcaaagcctgagccggtcgccgtcgcaggcaccagtatgagtagaatgcgttagataacaccaccacggcggtggcgcagaataccgcccggaagccataactggcggaaacggcggcgcccagcagcgggccgctgacgttgccaacgtcccgaaatgattggttgtagctgaaaattcgaccagccacctgatttgtacaattataaatcaataatgtttgcactgcgggcagtagcgcgccgtcggtagcaccgagcaaaaagcgtaatactgccaattgccacggcgtctgtaccagcgccattgggatcaacaacaacaccgacagcgccagcatagcgataagaatacgttcggggccgattttatcgcctaattttcccagtctgggggcactgattaacgccgcaacgccaggcaccgaggcaatcattccgctaacaaatgccagattgtgaatatctcccgccagctcgcgtacgtacagcgtcaaaatcggtgcgattgaaccggttgccacctgaataatcatggtagtaacaaacaggctaagcaccagtttaggatttttcagcgattgtaaaacctgccgtccgttgagcatgtcttttttcaacaccggcgtaaattgctctttaacgcacagtagcgtcataacaaagcacaggaacagtacggcggcggtaataaagaataccggacgtaggccgtagctatctgccagtaaaccaccgatcagcgggccaattaacgcgccgctgacgccgccggtagacaacgtgcccagcgcccagccgcttttatgtcgtggcacctgagtggcaatcagcgcattggcgttgggaataaagccaccgagcagacccagcagggcgcgtaacgccagaaattgccagatattctgcgccattcccattaacaccatcacgatccccatgcctaatgccgatcgtaatagcataatttttctgcctttacggtcggccaaactgccccaaaacggcgacgcaatggctgaaaacaggaaggtaatactgaacaccagccctgaccacatattcagcgcctgatgaccagtcacgccgaggatttccacgtataaaggcagaaaaggcataatcagactgaaggcggcaccggtcagaaaacagcccaaccaagcgacaaataggttccgtttccagtgaataggttctggtgacgaggtcataaattaccgatagaagaatgtgttagctctgcggcacggtttagcgtcatggtgaggggcgttaatatggcaaagcacaaaagcagatgattagcctgttaagtatgcgcctgttgaatagatacatcaaccatttggttaacggtttttataaaaatgaaaagcaggtttattatctaggaataagcatataaattttttgaataagacgatgaggaagatgaatgagtacggcggaaagcgggaaggttaacagctgttagcaaagtacagcgatgtctgaaagcgtgaggggctgagcagggtcagagaaaacaaaagcgataaaatagccgcggggtcttgttcaccccgcgggaatagcgatcaaatctactagatttcccgacgtttacccgaattaacggtaggcttcgtttttggtgatcgagtaacggccgctgcccaacagcataatgatgataccgccgaagaaatacagcgcttcgttttccagcccccaggcacccacgtcggtcagagtaaagaacttaccggtgccaaccatcagagtggccaccagcaggttaacggcataaataaaggccgccggacgggtaaatagccccagaatcatcagaataggcacaatgatctcaccaatataaacgccgtaggcaacaaagccagggatgccctgagcctgtagcatatcggaaatccaactggtgccatgttggatttttgctaccccgtggaatagcatcaaaataccaaaagtcaggcgtaacagtagcttaccgccgtcttgatgatcggttaatcgtgtgaaccactgatttgcactcgccagcatggtgtatatccttatagaaattgaagaaataacctgataataactcttattaattacacacaattatgtgtagttaataatcattctcatagtggataaaactgacagaatagttcaaaaatattgaatctgcctgattcatttcttatttcttttcgtttcctaccttaatttctgactttcattccctgttttggcaaattgatgtcttacaaacctttcagagcagttagcgagtctgacgtcatggttggagtaaattcgatgacttcatatcgggcaacagcgttgaaagaatcttcagccagaatggcatccagttcgtcgcggggtaaggcgatggcaaagataatgccgccagtgcgcgggtttttacgcccggaagcgatgaaaatgccctgatcgtagtatttgcgtaaccaggcaatatgggcatcgagatgagtatcgacttcttcaacgggacgatgataagtgagattaatgatgtacatagctaagccatatggaaataagagaaagataaattcccatgttgattacaaattaacaaggcttggctcggtatttttgtcgttaaaaaagggctagcgttgaataaccagagggatgcagcgttgatttacgccggtgcagagaaagccccggcgtgatattgcgaaaggcgtcagagcgctaatcgtacagcgagggggcgccttccggacgggttttgaagcggcggtgcagccacatatattgatccgttgccaactgaatttcttcttcgatcactttattcataaaggctgcggcagtgacttcgctttccagcgggaagtcttctaccgccggttgcagaatcagttcgtaacctttgccatcgggcagacggcgcggggtgaagggaatcaccgccggtttcgccgtgcgtaccaataaataagtgccggtggtggtggccgcatcgtcaacggcaaacagcggaacaaacacgctgctgcgtgggccatagtcatgatccggcgcataccagatgatttcgccttgtctcaggctacgaatcatccctttcaaatctttgcgatccagcatggatttattggagcgcattcggccccaagtctgcatccaatccattgccttattatcgtgggggcgataaaccccgattcctgggttatgaatgccgaaaatgcgggcacccagctccagcgttagaaaatgtagaccgatcaacagtacgccctgaccattctcccgagctttctcaatatgttctagtccgctgactttacaccaacgattgatgcgccagtctggccaaaaccaagccataccggtttcaaacagtcccataccgacagattcgaagtttttgaccaccagctgctcgcgttccgctttggacatttgcggaaagcacagttccagattacgttctgcgatataaaggcggcgtttgaggaaacgcattgagaaacggccgagggaagtacccagtgtataaatcaccggataaggcagtaaaaccagcaagtaaaggatacccaggcctaaccatgtcagccagtatcttgggtgcagtaacgagcgattaaaagaaggaacttgcatcatgtgttctcagcttcagagtagtaatttaggacagttaacttttacgttatggcggctaatctggggccgctaatcatgctttcaatatgtttatctgtcatttaaggtagttctattgtggcacttttagggaaaaacgcgaaaacagaccgcattaaaaaactattcttagtaacatttgctttatttttgagcaaaataaaccggttttagttgataaaataaacacgcctagcttatgccgctacgcttattcagcaaactgactaattctgccaaactcgcagcagccattttttccatgactttagctctgtgaacctcaacggttcttacagaaacacaggctttattggcaatgtcgcggttgatcaatccttgcgctacccattgtgcaatccgctgctcttttggcgtcaggctggcgtagcgcaaattgacctgatggcgtgaaaccgcctgttcggaatgtttcaatgcctgctggagtgcattaaccaaaggctgagtggcgacgggtttttgcaggaaatcgatagcaccttgcttcatttgttcaaccgccagcggaacatccccatgtccggtaagaaaaactaccgccagcgtgctgcctgcttcacgtaaacgccgatggatttgtaggccgtccagcactggcatacgaatatccagcagtactaccgcggtttgaaacaaatcggcttcgtttaggaaactctggccctgatgccagatacagactttatagcccagactttccaataaaaaacgacaggcatcggtcacggccaaatcgtcgtccactaaatgtatgactgacactaacttgttccttttagtgaggaatttagagggaagaataatcggacctctaacccagctgcgccgttagcggcaagggcgttggttaacgtcattttcccaccctggctgcccatcagccgttggcaaatcaccaaacctaaccccaggccatctggttttcccgatttgaatggcataaatagctgattgagctgcgaaaccgttaatccgccaccatcgtcctgcaaactgagttctgttccttcgggcgtttgattgccgttcagacatagtctccgcgcgccggcctgtaggctgttggtgaacaggttgcaaaatatctggtcgagcaaggttgcagggagcatcagctgtatttcagccggaaggtcaatattcagcctgctatcaggataatgatgtggcgcgccgataagttgccaaacgtgctctgccacgttcctaggtgactgcggaatacgcgtggacgtggctggcgctttgtccacccaaagacgtaggttggcgataatatccgcccctcgctgcgcctgggcgctgatttgctgtaacaccggtagcagcggatgatctggctgttcacgttttaaacggatatcgcagccttcggcgtagtggcgaaccgccgaaagtggctggttgagttcatgagcaaagccggacgccatttcccccaaaatactgaggcgttgagcttgctccagtgcggtttcccgctctcgtagctgctggtgggccagctctaactgctggctgcgacggcgcactaaaaaggccacccaaatatgattcgcacccagcagcagcaatattgccgcgataatcccgagcaatagccggttttgtagtgcccaggaaagtatcgcctgccatagctgcggctgttctggatgctgatttatcgagcgcaacaaggcttcgacctggctggtggaggaaggcgcgccccattgcggctccttgctgaccgttggcgtgagcagcatccgcgttacttggtcagccagcgaatccggtacctgcgccaacgcggcaaatgaccagttggggtataaatcactgctggtcagacagggcactgtggtgggtttagccagtaatgctctgaaatcagaggcctgcaataatccttcgttttgtaaatcttccagcaagcaggtggggactatcgcggcatccagagcgccatctcgcagcaaatacatcaatgtatccaccgggaagccggaaaagtgcagattaaaatcctgcccaggccgtaagccagcgtcccgcaaggctttgtaacctaaaagataaccgccgaatgcatccgctgataccgcgccaacctgtttgccgcgtaactcatccgcttgagtgataggactgtcctgacggactaaaatcacgctgccaatcacgttgcggctggcgttgttcggctcatggctggatcgcagtgaaaccagccagcgtagcggatagtggctatctatttgcacgtactgcgctggattggtgagcagaaaatccacgcgcccatgttgcacggcggttttcatcgccgtgagatccaatggcaacaagcgaaaatgctgatcgggcaagccttgattgaggctatcagccagcggctgccagcgttgcagcgtttgggcattgccgcgtaatgccagtacgccaatcgtccattctttgctgtatgccgtcagcgaaacaccgtaacacagcaagataatcaacaggtttcgcaacgtgtcttctcctttttatgacccagatcgccccggtgaattgtcctggatcaagtccctaaagggaatgtggaaaaccacaatagggcttctgtttggcaatttctacactcctcaccatcaactcgtcacatcttcctatcaattaaccgacggcgggtttggagaacaccatggatcgagggaaaagagagtttctacagcgattgggcgtgctaaccgccggcgcagctttggttccgctggctgaagccggttggaaactggaaccgagccgtcgcaacggcaacccccagcgtcgctatgccatgctgatcgatctgcgtcgctgtatcggctgtcaggcctgtaccgtcagttgtgccattgaaaatcagtcaccgcaaggccagtttcgcaccagcgttaaccagtatcagatcgcgctagaaggcgagggcagcgtaaccaacgtgctgctgcctcgattatgcaatcactgtgataacccgccctgcgtaccggtgtgtccggtacaggcaacctatcagcggcaggatggcattgtggtcatcgataacacgcgctgcgtaggctgcgcctactgtgtgcaggcctgtccttatgaggcgcggtttatcaatcacaccactcaaacggcggataaatgcactttctgcgtacaccgtctggaggccggtttattgccagcctgcgtggaatcctgtgtcggcggggcgcgtattatcggcgacttgcacgatgaaaacagtgaactgcgccggatgctcaaacagtatgagggcgaaattaaggtgctgaaaccggagcaaggtacgcagccacaggtgttttacctcggtttaaatgaagtgtttactcggccgctacaggggcaaccggcgctgtggcaggaggttcacccatgattcgtgaaattctggtgcgtccgcaggaaatcagttggttaccttgggcagtgcaatattttttctttatcgggctggcctgtggtgcagtgttactcggctgttggcaacgctggttcaggcgagataaagggccacagctagaacgagcggcgctgatgttggctaccgcggcggctattgtggcaccgttggctttgagcgcggatttacatcagccagcgcgcgcctggcatttttacccttattttacgccctggtcgtggatgtcatggggttcgctgttcttgccgctgtttagcgggctggtggtgacctattttctggtcttaatctacggccaacgggtaaaccggcctttgactggattactgcggctgttatcgattctgacggcgttatcggcactttcgattctgatgtataccgggcgggaagtgtcggtgctacgcgctcagccgctgtggttcaccctgtggctgccgctgtttattttcctgacggcgatgcaggcggtgccttcgttgctggctttgtggctgtggcgtcagccgcaggttcagaggtatctggcgcgttggcaactggtttctctactgcttttggccttggtgacgttgctatgggccggcggcgcgacgctttctgctgcggcgttacgtctgtgggccagcgggcacccgttaaccgcggctgcgccattattgattggattgatgttattgggaatggcattgctgaatctgaaacgttgcttacctatcggtgtggttatcctgcaaagcctgctggcgatggtgatgtgctggatggtgcgttggctattgctgatgcaaagccaaaccttgcctaaatataacgtgctcgcgaacccttatcagttatcgccgggtaccgacggattgctggcgatcatcggtacgttcggtttatgggtgacattaattattgcgctccgtgaaggagtcagatggtgggaagggagagtgcaacatggctaaaacgacgcggcggcaatggttaaaaggcggtttggctctggggggattagtggcctttggcgcaggttatcacgatgtggtgcgtaaaacgctaattgggctgcgggacggcagcgccggaaagttgacgcgagaccccattaacggcaactcactcacgccggaaggccatgccgggcaagaatggcaggctacgccgcatcaggcggtttcgatgacacaatgttttggctgctggacgctgtgtgggctacgagtgcgagtggatacgccgcaaaatcgcattttgcgaatcgcaggcaacccctatcacccgttgtctcacgaccaccattttccctacggattaccggtgagcgaagctttgcgccgcatgggcggtgagcaagggttggcggacagatctaccgcatgtgctcgaggcgcgacgctactggaaggcgtgaccagcccttatcgcgttcttgagccgatgaaacgagtgggggcgcgtggtgaaggtcagtggcaacgtatcagtttcgaacagttagtgaaagaagtgacggaaggcggcgatctgtttggggaaggccatgtcgacggcctgcgggcgattcgcgatctggatacgccaatcgatccggctcagccgtccttggggccgaaggccaaccagttgctgatgaccaacgccggtgacgacgggcgggacgcgtttatccaacgctttgctgccaaagcctttggtactaaaaatcttggtagccacggcgcttactgcgggctggcttatcgcgccggttctggggcattaatgggggatttggataaaaatgcacacgtaaaaccggattgggataatgtgcgttttgctctgtttttaggaacctctccggcgcaatcgggcaacccgtttaaacggcaaggcagacaattagccaatgcgcgccaacgggacgattttaattacgtggtggtggctcccgcgttgccgctgacgaccacgctggcaaatcagcataaccgttgggtgcccgtgctgccgggcagtgattcggcgctggtgatgggaatgattcgctggattctcgaacaggaacgttttaacgcgccatatctgaaagtaccgggagaggcggctatgactgccgccggagagcgcagttggactaacgctacccatttggtgattgttagcccgcaacaccctctggccggtcagtttctgcgggcggcgcatttgagcggtgaaatccttgcggaaggggaagaaagcccggtactggtggcgcagggcgatggggctttggtggcggcaccggttgcgatggacgcggagctatatgtcagtcagagcgttacgttggcggacgggcagcaggttgacgtgcaatcggggctgagcctgctgcgtgcggcggctaatcgttttacgctggaggaatacagccagcagtgcggtgttccggtggcgaccatcagcgggttggcgaaagaattcaccgcctatcagcgtcaggcggcggtgatttcccacggtggaatgatgagcggcaacggtttttataccacttgggcggttatgatgctgaacgcgctgattggtaacctgaatctgaaaggcggtgtttccgtcggcggaggcaaatttgacggctttgctgatggcccgcgctaccaactggccagtttccccgggcaggttaaatctcgcggtttgtcactatcccgcagtaaacagccttacgaaaaatctgaggaatatcaacaaaaactggctgccggtgaaccgccgtatcctgcaaaagggccgtggtacccctttgtcggcgggcagttaaccgagcaattggctccggcgctttctggctatccttacccgctaaaagcctggatcagccatatgaccaatccgttgtacggtgtcgctggtttacgtggtctggttgaagataagttgaaagatcctaaacatttacccctgtttattgccatcgatgcttttatcaatgaaaccactgcgctggctgattatatcgtgccagatacacataatttcgaaagctgggggtttagcgcgccttgggctggcgtattggttaaagccagcactgcccgctggccggtggtggagtcacgcacggcgcgcactgccgacggacaagcggtggcgatggagagtttcctgatcgccgttgcgaaagcgctggctttacccggttttggtgaaaatgcgatgcaggacgtacagggcaaggggttaccgctcgatcgtgccgaagatttttatctgcgcgccgcagccaatatcgcctatctgggtgaaaaccccgtgcccgcagcgcaactggacgaattacaactcaccggcgtggtacgtttactgccggaaattcagcgcagtttgtatccggatgagcaaatgcgggttgcgtatttactggcgcgaggcgggcgttttgcgccgtatgaaaaatcgtggaacggcgacgctactgggccgcagtggaagaaaccgctacatatctggaatgaaaatgtggctaaacatcgtcatgccatgaccggagagcgttattcgggttgcccgactttctatccgccgcggctggccgatggctccagtattcaccagcattatcccgtgcagagttggccattccagttgatgtcgtttaaatcacatttgatgagcagctctacgccgatgattgagcgtctgcgggcagtcaaagccagtaatctggtggcgattaatccgcaggatgccaaagcgctgggcgtggcgcacggcgattgggtcaaactggaaacccccggcggcagcatgaaagcgcagctcagtgtattagatggagtgatgccaggagttattgcaattgagcacggttatggtcatcgcgaaatgggtgcgaatctgcatcagcttgacggcgtggaaatggcgagtgacagccgaatcggcgcaggcgttaatcttaatgacctcggatttatcgatcctacccgagaagtgccaaatacctggctggattgggtgagcggcgcggcggtgcggcaagggcttccggctaaactgacgcgcttagcctgatatcagtttgttgctttgcgtgcggaaccccttccggaaagaaggggtttttctttttatagcgtattatatatgcagctaattaatcgccataaatgggatagacaacggatgatgcgagcagaaaaagtcagcgtcgggttattgttcggtggcgtcctgctcggttatgcaggtgcacactggcaacacaattttttactggtattggccggagcctcattgctggctggcattatagcctctggtttcaccgattgtcgtcgctgcaaaaagccttaactccgtgccgtagacgacgatcggcgctgtccgataaaaggcgctacgctgtggatgatcatcccgataatgaccagcccaattcccgccagtgataaactggtgggtaatggagccgccagccagaccatttccccaagcaaagcgaagagcacttctccagattgagtggcttccaccgctgctaaacgggaataatcctgtttgaccagattggttgcggcaaagaacagcaaagtggcaatcacgccggagaacaacgccaccagcagggattgctcgacctgcccctgagagggccagccgacctgatacaccccaacggcagacagcagaatccagaatggtagactggccagcgtcatatttagcacccgctggagggtatttacctcaccctgacaaatagccatcatcttgcgattgcctaacggatacataaaagcagccaatgttaccggcaacaaacaccacagcgtttgttgcaagttcaacgattgagcgtgctgccactgcattaacccaacgccgatcaaaatcaacagcgaccagcgcaatcctttgaaggggattttaccgcgacgcgtctgtaacccctgttccgtggcgatttgctgtttaaacagcgggatcagcagtgagcctgcaataatggtaatttgccaggaaccggccaccagccagccttcgccataagatcccgccagactcagcggcgcgtaaaacaggccaaacccaacggtgctccacagcagatagcctgaccagtattggcgcaaatggctcagactttgccgcagttgcccacgcatcattaccagcaaccacagcatgggagccataaaaataaaccgcagcgcggcactccagatccagctgccgccggataaatccatggctcgattaagaataaaagtaaaagcgaaaaagaatgacgcggcgaggccataaaatatagcgcgcatgattttcctttttaaagcagtcgccaaaatccctgagtaaaatctgataatgaacagaatagagtcgcgggagtcgatagccatcaggcggaaagcggaacaataaaacaggaatacagatctacgtcgctaacgtcaagtctctgccaattaaccggcccctaaagatgtgaccgcgctcagtttcgggtatgatgtgcgccgcgcgggtaaatgctcgccgcaaccgcagtttcgctgcataaaaatctctcagaaacctcttcgaaagacaggaaagtacaccatgccagtgttacataaccgaatttctaatgaggaacttaaagcacggatgttggccgaaaccgaaccccgtaccacagtttctttttataaatacttcaatctggatgacgccaaagcattccgtgacagcctttacagccaatttgtgaaattgggcgtatttggccgggtttacgtggcgaaagaaggtatcaatgcgcaaatcagcgttcccgccaaccgttatgatgagtttaaagcggttttattcgcttctcatccggcgttggatcaggttcgcctgaacgtagctctggaagacgacggaaaatccttctgggtgctgcgaatgaaagtgcgtgagcgcattgttgccgacggtattgatgacgacagctttaatccggcaaacgtcggccagtatctgaaggccgatcaggttaatcagatgattgacgatccggatacattgttcgttgatatgcgtaaccactatgaatatgaagtggggcattttgaaaacgcgattgaagttccgtccgatactttccgggaacagctgccgatggcagtagaaatgctacagcaagacaaagacaaaaatatcgtcatgtattgcaccggcggtattcgctgtgaaaaagccagcgcctacatgttgcataacggcttcaaaaatatttatcacgttgaaggaggcatcattgagtacgcccgcaaagccaaggaacagggtttaccgctgaaattcgtcggtaaaaactttgtctttgacgagcgcatgggcgagcggatttcggacgatgtgattgcgaactgtcatcagtgcggcacgccttgcgatgctcataccaactgtaaaaatgacggttgccatctgctgtttattcaatgtccaagctgcgctgccaaatttgacggctgctgtagccagatttgtcaggacgaattgaaacttccccgtgaagagcagcgcgcccgtcgtgctggccgcgaaaacggtgtgaagattttcaataaatcaaaaggattactgcaaaccactatgcatattcctgcgcctgaaaaatctgacgactaaagctaagcttaaagggttagtttctgcctcaaccctctggctatattcggaaaattaagtttaagttgagggatcgctctgttattttcgatctctcactatttctatcatcgttctcgatgacgacctcgatgcaaggacagattatggtaacgtcggcagtcagcaataaaggtttacgtattgtcgccatgttggccatgctggtagtgattatggccggaatcaaggcggcgtcgcccatcgtggtacctttccttttggcggtatttctctccattgtattgaatccattggtgagtttgctgcaaaaaatcaaaatcccccgcacactggcaattgtactgttggtggtggttattattttgctgatgtcattcctgttaggaatgctcggtaattctttaaatgagtttgcccgctcattaccgcaatatcgcggcatgatgctggaaaaaattcgcgatctacacggttttgccgtgcgtttcaatattgatatgtccgtggatgacgtaatgaagttcgtcgatcctggcgcggccatgaatttcgtcactcgctcgattagccatctttccggcgcgatgaccggtattttcctgctgttgatgacggtggtgtttatgctgtttgaagttgagcgcctgccgtacaaattgcaattaatgttcgacgatccggtaaaaggcattgctatcttgcagcgtgcggtaaagggcgtcactcactatctggtgattaaaacgattatcagccttgctacggggctggtggtttggatattcctggcatcaatgaatgttcgctttgcttttatctggggtttgctggcattcgtactcaattacatacccaatatcggctcggtgctggctgctatcccaccgattattcaggctttattgtttaatggctttgccgacgcgctggcggttactggcggctttattctgataaacctgattggtggcaacatcatcgatccgcgcatgatgggccgtggactaggactttctacgctggtggtgtttctgtcattgatattttggggatggttactcgggccgatagggatgctgctgtcggtgccgttgacgatcatcgctaaaattgcgttggagctgacgccaaccggccataaatttgccgtattgctgggggatggtaaaccggcaacagatgaaaaagagtcgtagagttaggccatagcagtgcgatgcggcatcaatgtatgcctcatcgcgcattttcagcaacaaatacgcaaagataatgattcggaaagcgggatagaccgtcgttgggaacgacgttaagcgtagaaaaagaagtagatatccagcgccaataaaattagccataggcaaatgtagaacactaaatgtgcgcgtacgttgttgatcaacatcgaaaataatttattgaacatggatgccaacgggctgctgagctttgtgattattatagttatatttattattaaaacaataagttactactaagccctcaacggatattgtccaatagagtttctcttttacggtatttatcattaaaaataaagggtattactttctaaaaataaggaaggtagcaggtaaatccgaaactctgactcaataacgataacaattagtgttagggggaaagctgacatgcaatataagaatagttaattaattaaagttatcttcagtgagatccccattgtagattccggctatatattctccatgatatcgagcgtggttaatattagccggatttttaattttactagtaagatattgctgccattaattttatccttaaagatacggttaaccagtatcttcggaggcattattgatggaaataaagcttaccaagaaatgtgtagctaaagaggcgctgaccgatggagaaaacagtgagccatcttcaatacaaatatttaaaaacgttatagataaagcatagctccagacgattcctaacttttattttttcggtgatatgtcttttatgcgaatatacggtgctatcactgatatttagcttttttgctatgcgataatttggcatttctgtcatccagtaacacatcactttatgttcttgcggactaaataaggacgaatgcgttgtcccttgctgccagccttcctgactaccagcatcctgcaagtgtgtcagtgagtgcaataaatcgggtaagcgccgcttggctaatattgatacagtctccgttaaaggtattggtgtttcgctaaagggataagatgcatccagataaatatagactctggcgcgtgtacagcgggtaataaattcctccagcaatggacaatgtccgccgtagcgacaatattgggttaaattgaccattattaccgcaggatcgaaactctgaattaccagcgttgcttgctcaacagttgctacatccattaaatttacagatgacatgctatttaagtatttatttacaccagagcgagtgtaataacattcgtcgatgattaatattctcatggtgttacatccttgtcatacgggcaaccatacccggccgcaaacgcgaataagttaatcctcaggtagctttagcgtcaattcgggattcgcgatgctaatagacggcatttacgaatggataattataaataagcaggaaatagcagaaatagcagtgggataatcgaagatgaacagaataataaaaaaatgcaggagattctaaaactatcagaatatcctgcgataaatagcccgattacgctaagacgatcagttaaatcgactcaaagaaaaaggtttaatatcaataggagacgccttatcttgcgcaaacagcgcggcgatttcgcccagagcagtcgcgaacttaaaaccgtggccacttagcccgctaaataccataattctttgactttctggcagcgtatcgataataaaatcttcatcaggactcatatcgtaagtgcaggatgaaccccttaaacacacgccaacgccgggcaaatagttgcgtaaaaagctgaaaacttcggttccatcctcggcaaaaccgccaaaaggcttgcgttgatccgcagattcaatgagttgaccgccgttatgtttaccgattttcagttcttccttcttcgacgggaaaccatagtaatggacgttatctggagtttctacggtgaaggcggggaagtgattttcttcgctgtaacgtccgtctgcgtgatgccaggcaaagactttacgcacggcggaaatggggagcgtaggaagtaattttttcacccaggtgccagcggtgaccaccactttcttaccgcggtaggtaccatcgatagtcaccacatccacgccattatcgtcagggtgaatagccgaaaccggacagttgaatagaatcccgcagccagcggcggtgacttctttaatcagggtggagacggccaaatcagattgcagatagcctgatttcggctcaaatacgccgatatagtcgtcaggaacggtgaaaagcggccatttttgcctcacttcgctcccgttcatgacctgaatcggcaaatcgtacttgcgggcactttcctgtacgtttttcaggaattcggagtcttgcgggcccaggttaatcacgccgctggcatgaaacagctccgcgccagtcgctgtggacaggccatcccacaaggtttgcgcacgaagaatcagtggcacatatttttccccttcgccataagcatgacgaatcaggcgagtgtcgccgtggtgactgccggattgatgtggcggcataccgctgtcgatcatcagaacctttaatccagcctgcgccgcgtaataacccgcagctgagccaacggaaccgctgccaaccacaatcaaatcatattccatgctctgggactccaggaaatagcgtatatgcctgataaaccttcaggccatcgtataaaggcaggctacgcaaaagtaataattatgtgtattagtaataacatgagtagaagactatctaaaggggcgaaacgagcgtgagggcgggagtggcgaataaaaaggcacctgatgaagactcatcggtgccctggggtttagctttgaaataactagtgttttcggtggtcaatgtctacataatccgttgattcgatcttagcaatgcctgcttctagaatattaattaattggcgtgctacatcggtggtcagccagagcgttctatcgactaaggcgttctctgtgggttgatccacggaagacaggtaatgaagacgaatcatcatggcattgtacgcgtctacagtgctgatatcccagcctacgagcgggtgagtctgaataacttcatcatttctgtccatatagaccccttattaagtagtaactaattgaagtaactaatgaggatcattcggctcataattgagtgagctttttcagtatacgcaactagatatttatttggcgaataacacaacatctttacaaatttgtttaataacgctgagaaaatgcacaataacgcgattcagcttcaatatgggcatagaaagaaagaggacaaggggctgagaaaaaataatcagagaacatgatgtgaggacaaaaaagccgaggagcgactccccggcaaaaactgcataacagtgagttattctgcgtcaaaccaatcgtcggcgctttcccaaatttcttgcaatatttcagagatccgatctttatcggttttggctccgccaagtaccgaaagatcgttagctccggcataacgaatcctgacggtcgtatccgggaattgagcattgagccttttagtgagctccccggttaaggcttcaatcgcgcccgcgggtaatgggttttttctatcaatgctgacttcaacacgcatgtttcatcctccgaatattgatactgtatgtttatacagttaaatgtaatgtgcgacaagagggagaatgaaaaaaatgagaaaaataagggaagagaataacgcttccccttgaaagacattagctttttactgaccaattcagcgtttggcctgccagataaggcacaatagattcgttaccaagcgaaatttcttccggctgggtgaagggctggcgcaccaactcaacaaaatcttcattgactggcaaaccgtagaaacgcggcccgttcaatgaacagaaggcttcaagatgttgtaaagcctccatttcttcaaacacggtagcgtaggacggtaaggccgacggcgcattgaatacgcccgcgcagccacaggaagactctttgcggtgtttggcatgcggcgctgagtcggtacccaggaagaaacgctcgctgccgctggcaacggcttgacgcagagcctgctggtgggtgccacgtttcaggattggcaaacagaacaggtgagggcgaataccgccaactaacatgtggttacggttaaacattaaatgctgtggcgtgatggtcgcggcaataaaatcattacctgcaagcacataatcagccgcatctttggtggtgatatgctcgaaaacgattttcagcgcagggaatttttggcggataggctccagaatctgatcgataaagcgggcttcccgatcgaagatatcgacatcggcatcggttacttccccgtgaatcaatagcggcatacctaatttctgcatctgctcgaacagcggataaatccctaaaatatcggacacaccgtgggttgagttcgtagtggcattggcagggtaaagtttggccgcggtgaatacgccttgctcgaaacctgcggtcaactctctttcggtcaactggttggtcagataacaagtcatcagcggagtgaatgtctggcctttaggcaccgccgccaaaatacgttcccgataagcaatggcgctgctaacggtggtaatgggagtggccagatttggcatcactatcgcccggccaaatacctcactggtataagggagtaccctggctaacatttcgtcgtcacgcaagtggatgtgccaatcgtccgggcggcgaattttcagggtttgggattgtgcagtcatttggctagctccactttgatgatgagaatttcgaggttttttgctggtacgggagtgtttccggcggggtgtaaggataagcggaaagtgcgacagatgcatctgattgttcgggttaagttgaaaacaattagaaaaaggcatcttatatagacaggtattgcgtcagtgaattcgatgcaataaacagctatcggtcgtcaggccgacagaagattgaaacaggagagggtaaaatggaagttcgcgtcatcgccagcttagtggcgaaaccagagtttattgaagatgttaaggctattgtgcatcaaattattgagccaagtcgtgccgaaggcggcaatctgcaatacgatcttcatgcggaaatcggtcagccgggtacctttgtgttctttgagcgttgggcctccgatgatgcgctgcaaaagcacaataaaaccgctcatttccaggcatttgtcggccagttagacggcaaattggataatctggatatcaaaacgctgaaacagattgcctgattgactcggtttaatgctcagaaattacggttttcagtcgtaaaaaaacccgccgtgtggcgggttttgtcgttaaggagctcgctgtcagttacttgactggctgaggcttggtagccggtgccgtagccttgttcactgccgcgtgcgcgcccgcagagcctttacctgcaaagtcgaacgcagggcgttgccattcactgtgagctgacgcttgcgtagcctgagttgaggcagaagccggtgctttggtcatcggagcgaatgcatgatgtttgaagcgcacgccttccggatgaacaaccgcttcggtcactacggtagcggccacttcaacggttttcggtgcatcaactactggcgtttccggcgctgcttgcgtcgcagtcacttcagcaacaacggtttcagccacattctcttctaccacagcttttgttgttggcgcggtttcttcaactgcgtcagttgcgctgacaatggtttcggtatgagcttcaaacggtgcttcaacagccagggtttcggcaacaacgtcttctatagtgaccgctttcgctgcgatttcttcaaccgcaggttgagccgtcacttctggctgaacaaccgcttgcgctgctggctggttaaccggagtttcagctttcgtcgtttcaacgccagcagtttccatttcaacagttttaacttcagcagtttcaactgcaacagttttgactacaggcgcctcaacgactggagcagcaactggcgcgcggcccggtacggcagcagctgatgaagatgaaccacctggctgatgtttgtaagccgcaggcgctggcgtgaacgcttcaaccggtttttcagctttaggcgcttcaatcacagcaggttcagcgacaacggctggtaccgccacggtttgttcaatcgctggcgatgcagcaaccgaattcgcctgaccggtggtgactgccggtgctgcgatcacagcaggtgtttcagccgcttgggtattcaggttttctgcgatattttccgctgctggctcagcaacttgctgttcctgcggcagtgcaaccggataacgaataaacaccttgcctgacgccatttccggagaggcaaacgccccggccagaggcatagcggattgggttggataacgctcgtcacgatagcgacgacgacgttgaccactgacacgcaggtgacgtggtgaacggcgtgaacgacgtggcataccattctcgttattggcagaacgatcgttaccgttgtcttcatccgctgctggtgctaacagtttcacttcttcctgtgcaacaaccggagccgcggtttgctcggcgattttaacaacaggagtcttttcactggcggtatccgctgggttcagttcatcattggccgattgaatacgtactttttgattcaattgacgacgctgacgacgctgcatcacctgttggcgttcttcctgctcaggctggacttcttctaccagatttaccgctacaacgctttcaaccacttcagccgctttcacttcctgcggattctgacgttgacgacgttgacgatcgccacgttcacgacgcggttgctgttcttcccgtggcgctttgtcgttgtcgcgattttctaccgtagcttcaaccgcggtattttgctggttagaacgacggttacgacgctgatcttcacggccttcacggccttcacggatgtcacgattatcgcggtttgcatcccgattgccgttgtcacgcgcgttttcacgcgtattttcgcgaccttcacgcggcgtgcggtcaccgcgatctttgcggccattgttctgacggcgcggattacgacgatcttgacgacgattatcggtattttcggttttttcgacgacagccggtttcacttccgcttcagctggtgcggcgaacaggcttttcagaccgctaatcaagcgactaaacagacccggctgtgcggcactgacggctgcttttgctggctgcaccgcaggtttggccgctgccgcaggttcagcttccggtggcacttccgttggcagagagaaggtcgccagcgccggttgttccggacgtttgcgttccattggcgcttcttccagtggctgagccatctcttcttcatgcagtttcggcagcaggtagctcagggtcggaacttcttcacctttacgtacgcgcagcaccgagtaatgcggggtttgcatctggtcgttaggtacgataactgcacgcacgccgccttgacgcttctcaatggcattaaccgattcacgtttttcattcagcagataagaggcaatctggactggaacgatagcgtgaacttcatgggtattctctttcagcgcttcttcttcaatcagacgaagaatcgacagcgacagagattcattgtcacgcacggtgccggtgccgctgcaacgcgggcagacgtggtggctggattcacccagtgacgggctaaggcgctgacgggacatttccagcagaccgaagcgagaaatccggccgatctgaatacgggcgcggtcttgacgaacggcgtcacgcagacggttttctacttcacgctgatggcgaaccggcgtcatatcgataaagtcgataacgattaggccgccgaggtcacgcagacgcaattggcgagcgatttcgtccgccgcttccaggttggtattgaaagccgtttcttcgatgtcgccgccgcgagtagcgcgtgcggagttgatatcaatcgcggtcaacgcttcggtggtatcgataacgatagaaccgccggaaggcaaacgcacttcgcgctggaacgcagattcaatctgagattcaatctgatagtggctgaacaacgggatttcgccgctgtacaatttgattttgctgctgaaatccgggcgacccagagcggcaatatgctctttggccagatcgagaatttttggattgtcgatcaggatttcgccgatgtccgggcgcaggtaatcgcggaaggcacgcacgataacgttgctttcctgatgaatcaggaacggagcagggcggccttcggcggcttttttaatcgcatcccagtgtttcaggcggaatgacaagtcccattgcagcgcgtcggcagatttgcctacgccagccgtacggacaatcagccccatgccgtcaggcaactggagtgaagacagggcttcttttagttcagtacggtcgtcaccttcgatgcggcgagaaatgccaccggcacgcgggttattaggcatcagaactaaatagctgccagcgagactgataaatgtggttaaggctgcgcctttattaccacgttcttctttatcaacctgaacaataacttcctggccttcgcgcaatacatctttgatgtttggacggccatgagaggaataattacttgggaagtactcgcgagagatttcttttaaaggaaggaaaccatgtctttctgcaccgtaatcaacaaaagcagcttccagacttggctcaattcgggtgattttacctttgtaaatattcgcttttttttgctcatggcccggactttcaatatccagatcataaagccgctgtccatctacaagggcaacacgcaactcttcctgctgagttgcgttaatcaacattcttttcatcttaacttactcgttatttttacattggcgttagaactgcgggcaaaataacctcatggccggataaaccgatgaccccgagtcttctagcaaagccgtcaacctcacggttgtcgcctgcataggggcgcattatctcggtaagcctgtgtttctttctgaaaaacagcgcttttagtagagggcagcttctgaatttatgacaacagatctgatcccatttgccggccaagctgcaacccgcagcccgctaattgcttgatttcacattacgtcttacgccattgctgcgtttttgtgcgatcaggcaaacttattattccacaagttccttgatctaacgagaatcaacgcggaattaactgcattattccattgctgatactgatatagcaaggtgactttagctgtctaagtaaagattattttactgtgttcacagtgttggcgagtattgatgtgttattaaacaaaaataatgcgcaaacgttctcttcaatagccagactcacagttaagcacataaaaaggggtggcgctaattcctctgtataattagaatcgcgcaccatgaaaacagataatccagtagtacaattaatcaccatttctgccgacgaagccggtcagcggatcgataactttttgctcgctaaattaaaaggcgtgccaaagagcatgatctaccgcatcgtgcgtaagggtgaagttcgcgtcaataaaggacgcattaaaccagaatataagctggcggacggcgatgtggtgcgtgtaccgccggtgcgcgtggccgagcgtgaagacgcacccgtttcggcaaaactggataaagtcgcggcgttggccgactgtatcctgtttgaggacgattacctgctggtgctgaataaaccttcgggaaccgcggtacacggcggaagtggtctgagttttggcgtaattgaagcgctgagagcgttgcgtccggaagcgcgtttcctcgaattggtgcatcgtcttgaccgcgacacttccggcgttctgttggtagcgaaaaaacgttcggcgctgcgctccctacatgaacagctgcggctgaaaggtatgcaaaaagactatctggcgctagttcgcggccaatggcaatctcattgcaaggcggttcaggcaccgttgctgaaaaatattatgcagagcggcgagcgagtcgtgaaggtgagcagcgaaggcaaaccgtcggaaacccgctttaaagtggaagagcgctttgaacactgcacgttggtaaaagctagcccgattactggccgaactcaccagatacgcgttcacgcattgcatgccggccatccgatcgcttttgatgaccgttacggtgaccgtgatttcgatgcgcaacttaaaggcactggcttacatcgcctgttcctgcatgcggcagctttacggtttgagcatccgaataccggcgaaaccatgcggctggaagcgccgttggataatcagttacgccactgcctgttaatgctgcggaaaaacttcccggcaaaataatcgtgctgtcagcttcgaatagcatcggtaaggcgcaaaagtgcgccttactttgttatatcactctttttattgtcttattattagcgcttatctgcgctgttctgacttaacaacgcattcaccccttgttccatcagcatctcattaagcgcaatcagcggcagaccaatcaaggtattgggatcgcgaccttctaaacggtcgaacagacttattcccaatccctcacttttaaagctaccagcacaattccaaggctgttctatgcttaagtagccgtttatttcgtcatcgcttagcgttctgaaatacacctgaaaagtttcgcactggatatttatatgaccgctagcggaattgagcagcgtcaaaccggtataaaaagtgacacattggccgctggcctggcgtaattgtttaaacgcattctcatgattgtgcggtttgccggttattttcccgttcagcacgcacacctgatcagagccgataatcaaatgctgcggatagtgttcagccaacgcagtagccttggcgctcgccagtctctgcactaaggttggagcgtcttcctgcggcaacgggctttcatcgatatctggcgctgcggtaataaagggcaattgaagtttttccagcaatgctttgcgataagaagaagttgaagccaaaactaactgagacataatattttccataaaccgtggcgtaatttaatcagtcattttaaactgtccgccgctgaggaagcgaatattggtgaaaggtgcggttgaatggcctttttctttgactctatgtcgttacaaagttaatatgcgcgccctatgcaaaaagtaaaattacccctgaccattgatgcggttcgtactgcccagaagcgattagattacgcaggtatctattcccctgagcaagtgacacgcgttgccgaatccgtggttagtgtggacagcgatgtcgtggcctccttatcgtttaatatcgataatcagcgcctggcggttatcacaggtcatgcggacgtcgacgttacgttgatgtgccagcgctgcggtggcaccttcgcacaccatgtccacacaacatattgttttagcccgatcgtcaatgacgagcaggctgaagcattaccggaagcgtacgaaccgatcgaagtcgacgattttggcgaagttgatctgttggcaatgattgaagacgaaattattctttcgctgccggtcgttccggtacatgaatctgaacactgtgaagtgtccgaggcggacatggtatttggtaaactgcctgcagaggtggagaaaccgaatccatttgccgtattagccagtttaaagaaaagtaattaaggagtaaggtcaatggccgtacaacagaacaaaccaactcgttccaaacgtggcatgcgtcgttcacacgatgctctgaccactgccactctgtctgtggacaaaacttccggtgaaactcacctgcgtcaccacatcacagccgacggtttctaccgcggccgcaaggttatcggctgagtagtacttgctaatctttagcaaggcgataccttgacttgtctaaccctagcgttagatgcaatgggcggggacttcggtccctgcgtcacagtgcctgcttcattgcaggcactggcctttaatccacaacttaagcttctgctggtcggaaaccccgacgccatcactccattacttgcccacaccgatcctttgttgctggaaaggttgcaggtaattcccgctgagcatgttattgccagcgacgctaaaccctcacaagcaattcgcgccagccgtggtacatcgatgcgtatcgcattggatttagttaagaacggtgaggctcaagcctgtgtgagtgccgggaataccggagcgttaatggggttggcaaagttgatgattaagccgttagaagggatagagcgcccggccctgatgacggtgatcccgaaccaacgccgtagtaaaaccgtggtgttggatctgggagcaaatgtggaatgcgacagcaccatgttggtgcaatttgccgtgatgggctcagtcatggccgaagaagtcgtggggattacctccccgcgtgtcgcgctgctaaatattggcgaagaagaaaccaaaggtttagataatatccgcgaagccgccgcagtattaaaaaatacaccggcgataaattatattggttatctggaaggcaatgacttgctgaccgggaaaaccgacgtaatggtttgtgacggcttcgtgggtaacgtcacccttaagaccatggaaggcgtgataagaatgttcttgtcgttgcttaaatcatcgggcgagaacaataaacagtcctggtggcttaaactactggggcgttggctgcaaaaacgcgtggccaagcggttcgggcatctgaaccccgaccagtataatggcgcatgtctgttaggattacggggcatcgtaatcaagagccacggcgctgcgaaccaacgtgcgtttgcagttgcaatagaacaggctgtgcaggcggtgcagcggcaggttcctgaaaggatcgccgcgcgccttgaagctgtattacccaagagtgactgaacgtacatgtatacaaagattctcggcacggggagctatctgcccgtacaagtgcgcagcaatgctgatttagaaaaaatggtggaaaccagcgacgagtggatcgtgactcgcaccggtattcgtgaacgtcgtattgcagcaccggatgaaaatgtggccacaatggctttccgtgcggcagagaacgcgctggaaatggctggcgtcagtaaagacgatgttgggctgattattgtcgccaccacctcttcaagtcacgctttcccaagctctgcctgtcaggtgcagcagatgttaggaatcaaagacgccgcggcgtttgatttggctgctgcctgcgctggttttacctatgcgctgagcgtggccgatcagtacgtgaaaagtggcgcagtgcgtcatgcgctggtgattggctccgacgtattgtctcgcgcgttggatccggaagatcgcggcacgattattctgtttggcgatggcgctggtgctgtgttgctgggtgcgtctgaagagccgggtattatgtcaacgcacttacatgcggacggcacctatggcgggttattgactctgccttaccagaatcgcgaaacccaggatcagcctgcttacgtcaccatggcaggtaatgaagtgtttaaagtggccgtgaccgaattggcgcacattgtcgatgaaacgttacaggctaacggcttggatcgttcagaactggactggctggttccgcatcaggcaaatttacgcattatcagcgctacggcgaaaaaattaggtatggggttggataaagtggtgatcactctcgatcgtcacggtaatacctctgccgcatcagtgccttcagctttagacgaagcggtacgtgatggccggattcaacgcggtcaattagtcctgctggaagcgtttggtggcggcttcacttggggctctgcgctggttcgtttttgatttaacagaaagtcttttgatttaatagaaagtcttttgatttcacaggaaggcaagatgtcgaaatttgcaatggtttttccaggtcaagggtctcagaccgtgggtatgctggctgatttagctacacaattcccgatagttgaagaaactttcaccgaagcctcttcggttttaggctacgatttgtggcagttggtgcagcagggtccggcagaagaactgaacaaaacctggcagactcagcctgcgttgctcaccgcttcggtagccatctggcgtgtttggcagcagcagggcggaaaagcgcctgcgatgatggcaggccatagcctgggtgaatactcagcattggtatgtgctggcgttctggatttcaaacaggcggttaagctggttgaattacgcggccaactgatgcaagaagcggtacctgaaggtactggcgctatgtctgctattattggcctggataatgaatctattgccaaagcttgcgaagaatcggcacaaggtcaggtggtttcaccggttaactttaactcgccggggcaggttgtgatcgccgggaacaaagaagcggtagaacgtgccggtgcggcctgtaaagcggctggcgccaagcgtgcactgcctttgccggttagcgtgccttcccactgcgcattaatgaaacccgcggcggataaaatggccgttgctctggaagacattgaattccgggcaccgttgttccctgtggtgaataacgtagacgtaaaagccgaagtgtcacctgaagctatccgtagcgcgctggtacgtcagctatacaatccggtacgttggactggaagcgttgaatttatggcggcagaaggcgttgaactgctgctggaagttggcccaggtaaagttctgactggcctgaccaagcgtatcgtggacactctgtcagcagcaccggtaaacgatgttgcgaccttgaccgcagcgcttgaacaataataaagaggatagcatgagctttgaaggaaaaattgcgctggtaactggcgcaagccgtggcattggccgcgctattgcagaattattggtcgaacgtggtgccgttgtaattggtactgcgaccagtgagaagggggctgaagctatcagcgcctatttgggtgacaagggtaaaggtttaatgttgaacgtcgtggatcccacgtcgatcgacaaggtactggcaactattcgtgctgaatttggcgaagtcgacattttagtgaataatgccggtatcacgcgtgataacctgctgatgcgtatgaaagacgatgagtggcaggatatcctggatacaaatctgacttccgtgttccgtctgtcaaaagcggtaatgcgagctatgatgaaaaagcggtttggccgtatcatcacaattggttctgttgttgggaccatgggcaatgcagggcaggttaactacgcggccgctaaagctggcgttattggttttagcaagtctttggcgcgtgaggttgcttcacgtggcattactgtcaacgtcgtggcacctggctttattgagacggacatgactagggcgttgacagatgatcaacgcgcaggcattttaacccaagtaccagctaaccggcttggggaagctaaagaaatcgccagcgctgttgcatttttagcctctgacgaggccagctacatctctggtgaaacattacatgtcaatggcggcatgtacatggtttaagcactggcagaactttttgcattatttgaggtgaaaaccgcaaaataatgcaaaattgtggttcgaccagccgagatttagttgcatctttttcaacattttataaactacgaaaaccatcgcgaaagcgagttttgataggaaatttaagagtatgagcactatcgaagaacgcgttaagaaaatcatcgttgaacaacttggtgttaaacaggaagaagtactgaacgacgcttctttcgtagaagatcttggcgctgattctcttgacaccgttgagctggtaatggctctggaagaagagtttgataccgagattccagacgaagaagcagaaaaaatcactactgttcaggcagctattgattttatcaacgctagtcagcagtaagcgaacatatctaggcggtcactcgaccgcctaagtttttgtcccaaagtgttattttccctccttggaggacaaacgtgtctaagcgtcgagttgttgtgactggactgggcatgctgtctcctgtcggtaatacagtagaatccacatggaatgctgttcttgctgggcagagtggcatcagcctgatcgaccatttcgatactagcgcctatgcaacccggtttgctggcttagtaagaaattttgactgtgaagaattcatttcgcgcaaagatgcacgaaaaatggatgccttcattcagtacggtattgcggcaggtattcaggcgatgcaagactccggtcttgaagtgactgacgctaacgctgaccgtatcggtgccgctatcggttctggtattggtggcttaggcctgatcgaagaaaaccacaccgcgctggttaacggtgggccacggaaaatcagtccgttcttcgtgccttcaactatcgtgaatatgatcgcaggccacctgaccattaagtttggtttacgtggaccgagtatttctatcgcgactgcctgtacctctggtgtgcacaatatcggccatgccgcccgtatcattgcttataatgatgctgacgtgatggtcgccggtggcgcagaaaaagccagtacgccattgggcgttggcggtttcggtgctgcgcgagccttgtcaacccgtaacgacgatccacaagcggctagccgcccatgggataaagatcgcgacggttttgtattgggcgatggtgccggcatgatggtactggaagaatatgaacacgcgaagaagcgtggcgctaagatctatgcagaagttgtcggttttggtatgagcagcgatgcctaccatatgacctcgccgccggaaaacggttcgggcgcagctttggctatggtgaatgcgttacgtgacgcgggtgtcactacttcgcaaatcggctatatcaacgcgcacggcacttccacgccagcgggtgataaagcggaaacgcaggcggttaaatcggtgtttggcgctgatgcagagaaagtcatggttagctcaaccaaatccatgaccggtcacctgttaggtgctgcgggcgcggtagaatctatctttaccgttctggcactgcgcgatcaagctattccaccgaccattaacttggataacccggatgaaggctgtgatttggatttcgttccgcacaccgcgcgtcaggtttcaggcatggaatacaccctgtgtaactcgttcggcttcggcggcactaacggttcattagttttccgtaaagtgtaacagcgaccgattagtaacacagatgataaaaacccggttatccgggtttttttatagctattgtttgccaatgtaagtgaacagaaaaagataaatccgaaagtagtggaatatccggttgagaaaactttgggatgtaaactcaatgagagcttattaatatgtttgctcactagataaaccaccgaataaataaaagagagttggatatgatgttgataaacggtatggcgcaaaaccagctctctgcaaccgacagaggcttgcagttcggggacggctgttttactacggcgcgagtgcttaatggtgaagtttgctggctgcctatgcatatacaacgcttgcagcaaggcgcggagcgtttactgctgccaactattgactgggcgctattacagcatgaaatgaccgaactggcgtggcaggctcagcagggcgtactgaaagtgattttgacccggggcagcggtgggcggggttacagcggtgaggcctgcgaacagccgacgcgcgtattatcgattagtggttatccggcacattattcattatggcgcgaggagggcatcacgctggcgttaagtccggtagcgttggcgcgtaatccgctgctggcgggggttaagcatcttaaccgtttggagcaggtactgattcgcgcgcatcttgagcagacaacggcggacgaggctctggtgcttgacactgcaggccagctggtggaatgctgtgcggctaatttattctggcgcaaaggcgaggcagtatttacgccggatctcagtcattctggggtggcgggtatcatgcgtcgtcgtattatggcgcgactgtttgcttccagatacgcgttacactgcgtatccgaacccttagagacgctaagagacgcagatgaggtgctgatctgcaacgcgttaatgccgctggtttcggttaatcaagcgcatgaatggacttatagctcgcgagagctgtatgaattcatgcgaccacattgttaatatcgatttaatcgctaatatcaattccaaattttaaagatggccgatagatgaaaagaaaaaacctcagaatactaaccatcctagtggggatctgcttgggtttgctgtttttgggctatcagaaagtgcaaaatttcgccggttccgcgctggaaatcaagcaagacaccatttttaccctgcctgcgggtactggccgagtagggcttgaaactttattactgcaagatcatatcgttgtggatacgactctgtttccgtggttactgcggatcgaaccggaactcgccaatttcaaagccggaacctatcgttttacgccgggtatgacgatacgtcagatgttgaaactgctggccagtggtaaagaagcccagttcagtatccgctttattgaaggctctcgtttgagtgactggatggaaaccttgcagcaggcggattacgtcaaacatgagctggcgggtaagagtaacgctgaaattgctaaactgatcggcctgaaagataccgaacatccggaaggctggctgtatcccgacacctattcttataccgcaggtaccacggatctggctttgctgaaacgggcgcataaagaaatggaaaaagccgttgcccaagtgtgggaagggcgggatagctcgttgccatataaaacgccgaatgatttggtcactatggcttctatcattgagaaagaaaccgcgatcaacgatgaacgaaccaaagtggcttcggtatttatcaatcgcctgcgtatcggcatgcggctgcaaaccgatcctacggtgatttacggtatgggtgataaatatgccggaaatatcacgcgtaaggatttagacaccccaacgccgtataatacctacgtgatcgcgggaatgccgccgacgccgattgccatgccggggctggcatcgttacaggccgcagcacatccggctaaaacgccatatctctactttgtagctgatggtaagggcggacatacctttaccaccaatttagccagtcataaccaggcagtacgcgtttatcgtcaggcgttaaaggataaaaatggacagtaaatttatcgttatcgaaggtctggaaggtgcgggtaaaaccaccgccagagataccgtggttgccacactgcgcgagcagggtattaacgatatcgtgtttacacgcgagccgggcggtacgccgttggccgaaaaattacgcgacctgattaaacaaggtattgatggcgaagtgctaacagataaggccgaagtgctgatgctgtacgccgcgcgggtgcaattagtggaaaacgttattaaaccggcgttggcacgcggtgcctgggtggtaggggatcgtcacgatctttcttcgcaggcttatcagggcggcggtcgcggtattgatagccaactgatgacatcgctgcgcgatacggttttaggcgattttcgcccggatttaacgctgtatctggatttatcgccggcgattggattgcagcgcgctcgccagcgcggggcgttagatcgtattgaacaagaatctttggcgttcttcgagcgcacccgggagcgatatctggcgctggcggcagcagattcaaccattcaaactattgatgcttctcagacactggagaatgtcagcgcggatattcgtcgaacgctgactcagtggttaaacgcgcgggaaagcgcgtaatgaattggtatccgtggttaaacgcaccttaccgccaactggtcgggcaacatatcgccggccgtggccatcacgccctgctgatccatgcgctgccgggcaacggtgccgatgcgctgatttacggattgagccgctggctgatgtgccagaaacgtcagggagagaaaagctgtggcgaatgtcacagttgccgcctgatgctggctggcaatcatccggactggcacgtcctgtcgccggaaaaaggcaaaagcagcattggcgttgaactggttcggaacctgattgataccctttattcccatgctcagcagggtggagcgaaagtggtctggctgcctcaggctgaatccctgaccgatgcggcggccaacgccttactgaaaacgttggaagaaccgccggaaaacacgtatttcctgctgggatgctttgagccttcccgcctgttaccaacgctgcgtagccgctgtttttactggcatctggcttgcccggaaaccgccttgagcatgcagtggctggggcggcaaatcagcgctgagccggtcgccatgctcgcggcgttgcagctgagcgaaggcgcacctattgcggcagagcaactgttgcaaccggcgcagtgggcgcaacgaacggcgctgtgtcaggcgctggtagaggcgttagcccgtcaggatttgttgtcactgttgccgcagttgaatcaggataacgttgccgatcgtgtgtattggctgtcttctttattgctggatgcgttgaaatggcagcagggagcagggaattttatcgtcaatcaggatcagcgcccgttggtgcaacaattggctgagtcagcttctatcgccgtgttgctaaaatcggccaatcaatggctgcactgtcgccatcaattatcttcagtcgtcggcgtgaaccgagagctgttactcactgagcagttgctcaattgggaaaacagactgtctggcgccgatcgtacattttctcattcgttgtaaaagagtttacttattatgttgttagttgattcccattgccatctggacagtttggattatcaggcgctgcacaccagcgtcgatgacgtggtggctaaagccaaagcgcgtgacgtcggttatatgttggcggtggctaccaccttgccgggttttcgtgccatgacggcaatgatcggagaacgtccggaagtggcgttttcctgcggcgtgcatccgttaaatctggaagatggctatgattttgccgaactgcgcgcgttggccgcagcggataatgtcatcgcgatgggagaaaccgggctggattatttctaccagcaggacaatattccgttgcagcaggcgtctttccgtgaacacattcgtattggccgggatctgaataaaccggttattgtgcatacccgagatgctcgcgtagatactctggccattctgaaagaagagcaggcgcaggagtgcggtggggtgctgcattgctttactgaagatatcgcgacggcagaaaccttgttggacctgggtttttatatttccttctccggcatagtcaccttccgtaatgccgagcaattacgcgaagtggctcgttatgtgccgctggatcgtattctggttgaaacagattcaccttatctggcaccggttcctcatcggggcaaagaaaaccagccagcctatgtgcgtgatgtggcggaatacatggcagtgctgaagggcattagtctggaaacgctggccgaggccaccacggctaatttctgtcgactgttccacctggatgatttggcacaatctgccacactcaaatagagcctacgacgataattatttttaagctcgtaattaattccctaagcgagtaatgtttccacccgttttattgtgggtggaaaggtttcactgacgtttctttacaaaaaatagcctttttatactggataaggcatcttcttcaaagaaacgtgactgtcatcaaacattacgcaggctatttattttactcttcgtaataattaaaggggtgctgtagacaccccgattcgcaaaggctttactcccccctttgtaacgccaataaaaagcgagaagcagtaagaaagcactatttactcaggagcactctcaactatgtttaagaacgcatttgcaaacctgcaaaaagtaggtaaatcgctaatgcttccggtatccgtactccctattgcaggtattctgctgggtgtcggttccgcgaattttagctggctaccttcggtagtctctcatgttatggcagaagcgggcggttcagtcttcgccaatatgccgttgatcttcgctattggtgtagctttaggttttaccaataacgacggtgtttccgcattggcggcggttgtagcctacggcatcatggtgaaaaccatggcggttgtggctccgctggtactgcatctgcctcctgaagagattgcagccaagcatttggccgataccggcgtgctgggcgggatcattgcaggtgcgattgcagcctatatgtttaaccgcttctatcgtattaagttgcctgagtatctgggcttcttcgcgggtaaacgtttcgttccgattatctccggcttcacggcgatcttcttgggcgtagcgctgtccttcatctggccaccaatcggtacggcgattcagactttctcccaatgggcagcttaccaaaactctgtagtggccttcggcatctacggcgtagttgagcgttcgctggtacctttcggtctgcatcacatctggaacgttcctttccaaatgcaaattggtgaatacaccaacgcagccggccaggtattccacggtgatatcccacgttatatggccggtgacccgactgcgggtaaactgtccggtggcttcctgtttaaaatgtacggcctgccagcagcggcaattgcgatttggcactcagccaagccggaaaaccgcgctaaagtcggcggtatcatgatttctgcggcattgacctcgttcctgaccggtattaccgagccgatcgagttctccttcatgttcgttgcgccgattctgtacgttatccacgctattctggcgggtctggctttcccaatctgtattctgttgggtatgcgtgacggcaccagcttctcacacggtctgatcgactttgtggtgttgagtggtaacagtagccgcatctggctgttccctctggtaggtatctgctacggtctggtgtactacaccatcttccgcgtgctgattgccaaactggatctgaaaacgccgggtcgcgaagataactctaccgagcaaaacactaaaggcggcactgagatgtcagctgcgctggttcaagccttcggtggcaaagagaacatcaccaatctggacgcctgtatcactcgtctgcgcgtgagcgtggcggatgtatccaaggttgaccaggctggtctgaagaaactgggtgcagcgggcgtagtcgtggccggttccggcgttcaggctatcttcggcaccaaatctgataacctgaaaacggatatggacgaatacattcgtaaccactaattcaggtcggggagtgcaaaaaggaggcttaggcctcctttttttatgggctttacctttgatttcaacgtgtgattctggctgatgtttcttgtggtcagcgggcggtattttccgactctcgccaaggggaggataattcactgagaaaactgggcgattctgcggcacttgcgccggaaattgcttaatgaggttgaaacagatagaaattgtcgctcatactgcatgcactgatttttcccctacgaaggaaatatgttatggccgaagaaacaattttcagtaaaattatccgccgtgaaattccggccgatgtggtttatcaggatgaactggttacggcgtttcgcgatattgcgccacaggctcccacccatattcttattattcctaatatactgatccctacggttaatgatgtcaccgtcgaacatgaagcggcgctggggcgtatgattaccgttgctgcaaaaattgcagaacaggaaggtatctccgaagacggttaccgcttgattatcaactgtaatcgtcacggtggtcaggaggtttatcatatccatatgcacctggtcggcggtcagccactggggccactgctaagtcgaaaataattaagcaatttataattattcggtaaagtgatggctctgtgcatcgcgacttttccggtcatcgctaaatcgaggtatgcctatgcgccgtttcaaggcgtttttactgccgggaatgtttctgattcctgttatcactttactgggctgtagcgcgccgcagggtatcgccgttaaccaacggcaggcggttgtgatggattcgccggttcttaccgccggaattctggcagagaagccggcaatctcgacgctttcggggcggagtattgcaacatcaactttaatgagcagcagcaccaaagccgtcacggtgaattatcgtttctactggtatgacgctcaggggctggatttgctgccgtttgaaacgccccgaaaggtcacgatagggccaaactcatcagtcgatattcagtcaatcaccccgaatctggatgcgcgcagcgtgcgcctctatctgtttttataattgtgttgttggagtgggataatgaaaaggtatttatttgtggcgttggccgcgctggtgctgaccggttgtccttcccggccaccggagccgaccgagcagcctgcgaccattgaacctattaccccggtgccaccgattgaaacaccgccaccggccgataaagttcctcaaccgcctaaagctccccagcctattgactgggcggctagcgtagaaccattggtggcgcaaatggttaacgccaacgatgttgccgcaggcagcgttttgttgctggacagcgttaaaaataataccaacggtgccttacagatcggtaaagctaccgccgcgctgcatcaggtattggcatccaacaagaaatttgccctgattccggctgcgcagttaaccgcagcgaaacagactttaggtctgtcggaggaggatagcctcggttctcgcagcaaagccattggtctggcacgttacgttagcgctcaatatgtgctgtatagcgacgtgagcggcgacgtgaaagcgccagagatcgatatgcaactgatgttggtacaaacgggcgaaattatctggtcaggtcatggtaacgtacagcgttgaagcgagtctgcgtgccttgattgaaactcggataccggcggtgaataccgccggttgccatttcagcccggtatccggcctaactggtgaaagctggcggataaccgggcaaaacttccaatggctggcgcgggaacactcggtcgccaaaagagaattaggcgttaatcgtcagcgtgagcagcgtatcttgcagcagatgtcggcgcgtgcgttatctccgcgagtgatgattgccaatcaacactggctggtggtggaatggctggatggcgtggtggtcgaaccccagcagttcctgcaactggccgatcgaggcacgttggcggaattggtggcgcggctgcatcaggctccccgtaccggctatccgttgaatatccatcgacaattactcggttatagcgaaagaatggatccgtcccgccgcagtgcggactggttgcgactgcataaacgctttatggcgcaaaaaccgccgcgtccgctgaatctggttcctttgcatatggatattcaccctggaaatattatcgagacaaattctggtctgagattaatagactgggaatatgcggcagacggtgacgtggcgttggagttggccgcgatgtttcggtttaacggttgggacaacgcgcggcagcaggcgtttttacgccaatatggtcagcagccgggagcctatcaggatatcgccgctttgacgcggcaaatagcacgctggtctccgtggatcgattatctgatgctgatgtggtttgaagtgcgctggaaacaaaccggcgagataggttttttgcagtgggcagcgccgctgcgccgacgatttaatttatcgggtctggattcatccgccggataacaacatattttattcaatgacgtgaggtagttgtgggtcctgtcatgttagatgttgccagctacgagctggatgccgaagaacgcgaaatcttgcagcatccgctggtgggtgggctgattttgtttagccgtaacttccacgatgccgaacagttgcgtgagctggtgcgacagattcgcgcggcttcccgcgagcggctggttgtggcggtcgatcaggaaggtgggcgggtgcaacgctttcgagaaggttttacacgtttgcctgcggcgcagtcctttgcggctctcaacgataaggaaaccgccgggcgtttagcgcaagaagccggttggctgatggcctcggaaatgattgccatggatattgatatcagctttgcgccggtattggatattggccacgttagcgccgctatcggcgagcgttcattccacagtgagccgcaaaaggcgctggaaatggccgaacgctttattttaggaatgcatagcgcaggcatgaaaaccaccggaaaacacttccccggccacggtgcggtgaccgctgattcccataaagagacgccgagagatacgcgcccactggcagaaatccgcgcacatgatatggttatattccgtgagctgattcagcgtaacctgctggatgccattatgcctgctcatgtgatctacaccgatgccgatccgcgtccggccagtggctcggcttattggcttcagcaggtattgcgtcaggagctcggttttgagggcattattttctctgacgacctctcgatggaaggcgcggcgatcatgggcagctatgcggaacgcgggcaggcctctctggatgctgggtgtgacatgattctggtgtgcaataatcgtcagggggccggtcagcgtgctggataacctgtctccggtcaaagcagacaagctgagtcggttatatcatcgtgggcagttcggtcgcgaagagctacttggctctccacgctggcagcaggccaataaagcgttaacggcgctcagcgagcggtgggacacccataaacaagggttagggaactagcacgtaccggggtgtgtccggtgcgatttaccctgtcgtagcgaggataaagatgatcgtctatttacacggttttgattcaaccagtcccggcaatcacgaaaaggttctgcaactgcagttcatcgatccggatgtgcgttttatcagctacagcaccttacatccccggcacgatatgcagcatttattgaaggaagtggacaaagccattcagcagggcggtgacagtcatcctctgatttgtggcgtcggtttaggcgggttttgggcagaacgcatcggttttctatgtggaattcggcaggtggcttttaacccgaatctgttcccacaggaaaatatgagcggtaaaatcgaccgcccggaagagtatctggatatcgcgaccaagtgcgttcaggattttcgtgagaaaaaccgcgatcgttgcttagcggtgctttcccgtcacgatgaggcattggacagtcagcgcacggcggcagaattgcatccttattacgaaattgtctgggatgaaaagcaggggcacaagtttaaagatctttccgttcacctacagcggatcaaggcatttaaaactctcgattaacatttttttctcatactcgagccccgaagcgatcgttttttgacggtaacttcgggctttttctttcccaaagccatcggtaaacggtgattttgggtaaaaaagtctgaaattattaaactgtgacctgtcgctaactatttgaatattcttctagaaaaaatcctcccgccgcgtctttcagcaaaataaattgatatatatcaattttggtatgaccaaataaccctgcatgatattctgcggtcagataattgaatttactcaagcgaaccctatgttatctaaggatattattcatttacccttagctaacaattggttcacatttagggggtcattttgacaacgccaaagaaaaaaatcgttattattggtggtggtgccggcggactggaactggcgaccagcctgggccataaactgggtcgcagtaaaaaagcggagattgttctggtcgatcgcaaccacagtcatttgtggaaaccattgttgcacgaagtggcaactggctctctagatgacggggttgatgcgctgagctacctggctcatgctcgtaatcaccatttcaatttccaactgggttcattaaccaatattaatcgggaaaccaaaaccgtcagcctggccaaaatctgcgatgagcagggcgacgtgctggtgaccgagcgtgaattgtcttatgacattctggtgatggcgttgggcagtacatccaatgatttcggtacgccgggcgtgaaggaaaactgtattttcctggataacccgcatcaggctcatcgtttccacaacgaaatgctgaatctgttcctgaagtattccgctcagccgggtgaaaaaggcaaggttaacattgctatcgttggcggcggtgcaaccggcgttgagctgtctgccgagctgcataacgcagttaaacagctgcacagctatggtttcgaaggtttggacaatcaggcgctgaacgtgacgctggtggaagctggtgagcgcattcttcctgcgctgccaccgcgtatttccgctgcggctcatcaggaactgaccaagctgggcgtgcgtgtattgaccaaaaccatggtgactagtgcagacagtcaaggtctgaataccaaagacggcgaattgatcaacgctgacctcatggtgtgggcggcgggtatcaaagcgcctgactttatgaaagatatcgccgggctggaaaccaaccgtatcaatcagttagtggttgaaccaacgttgcaaaccactcgcgatcccaacattttcgctatcggcgactgtgcctcttgcccgcagcctaacggcggttttgtgcctccgcgcgcgcagtcggctcaccagatggccagccgttgctacagcaacattctggcgttgctgaatggtcaaagtctgaaaccttacgtgtataaagaccacggctcattggtttccctgtctaaattcagcaccgttggcagcctgatgggtaacttgatgcgcggttcaatgatggtggaagggcgtgtggcgcgagtggtatatatctccctgtatcgtatgcatcaggtagcgttacatggctacaccaaaaccggcctgatgatgttggtaggcgggattaaccgggtgattcgccctcggttaaaactgcattaatagcctgaagttcagtattcgcttagcgaatcggatacccggaaattgagttctgggaagttaaaactcgtagtagcacagagaaccgtcgtcacagtgtggcggcggttttttgttttcggaggttgacccgattttgcgaacagtgattcagattcttatcagagagatttagcgtatcgaattgatattgttatgtttgaaatacaagcagcgtatttagagctaattttatcgcatcaggatattaagtttttcaccaggtgaggcttaaggataatagtccgtagtgcagaaatatgttctggtataaataataaattgcaaaaaaataatgtccggtgttatcagttcgaatgcctccattgatatatagactttttatggttgtaaataaaataaccttgcggttaggtcgtcatcaattaatgttttttaatatatttggcggcgatcatactatcgcctttatcagggctatcttgagcgattaacgtggccggtggttgatacgcccggcggtgtgaaaccgtcgatgctgaaacttatagcagccagtgaaatgagcctaagattctataacagtaaggtttggctggaaagctggcagacaccgcaggctattccgctggcgatacacatgacattgcgcacgccgtcattcgcaaaatcgaacgagtctggttgttgaaaggctcgcaaatgttttcagaaaatcaatcatgaattcggcacccaaacgcggcatcgcgatgatcgtggtgttggtgcggctgggatattgcggaaagtctgtaggcgtttgtcgacagtgatgcctcgctgcaaacccgtctggcagagaggactgggagtctctggtttgcccgattcctttctttgcgcctaagcgcgggtgaatatcagcgaactaagtgctattcagggaatagatgcggatgtttatcaaaggcttaatcctcaggtatgtacactacccatgacaagacaaagcattaatgttaataccctaaatgtcgctcacagtgtcattctggaggcattatttacccccggcttagtgccactcaggcgcagatgctgttgcagcagcggccggaaaaaggatgggaaagcatagagcagttgttgagcgtcgcgccattagccgatgtggatgccaaagtgaaagcgcaggtaaagccgatattgagcgtgaatagccgctacttttggctgcgttcctgtattgaggttaacgacgtgagcttgaccgtgcagtctttgatcgtgcgcaatggcgcacaaaaatttgatgtgctgtggcatcagacaggagaagtggagtgagtgaatctctgaatctttttttcccccttggcgaagcgcagccgatcatatggcgacgtgactcggaaacgcctttcgtaccagaaactaaaggggaatggatttccccatgggcggcgcaggatatgttgacgcaatggccgaaattcgatgcgattcgggtgtttttccccggagaatgggctggtgttcgtaaagttgaattgcctaaagtctccaaaaaacatgcagagaaaatcatccccgcactgttagaggaagacttatgcgaagacattgatgatttacatttttccatactggaaatagatgaaaagcaggccaccgttgcggtgattactcatcagaaaatgcattatcttactcagtggctacatcagggcgaaatattggcgacaacgttattgccggattggctggcgttgccggaaggccatctgctggttagtggtgaacgctgtctgcttcgcacccatcaatggcaaggatggagcgcagaatcgtccctggctccgtacttactcaaggcacagttacgtgaccgtgattcagtgagccagctctgcgtctacggtgagttgcctgcggcactggcgtcggcgctggattcgtgcggtattgagaacacggtatcaggaacgctgcccgcgcctcagactagcggtgcgggtttgctctgtggccgctggaaaccgcgagtgaactatcagaaacagtgggagcgttggcgtccgacgatgacgtcgttaatagtgcttgtcggtgtcatgacggcggaacgactggtgtcattgtggagcatcacggaacgcgcgcagcagacccgcacggcggccgaagagagtttcctccaattgttccccgaacagcggcgcatcgtcaatttacgggcgcagctcaatgccgcgctgcgggagctgggaagtgggaccgcagaggacgaactgctggtgattctacccttggtcgcagaaacgcttgagtctaaaggaatactgaaacagatagatgttcagggaattaaatttgatcaacagcggcaggaattgtatctcaggctgagagccgccgattttgcgacctttgaggcgctgcgggaagatctggcgactgttttttccgtcaaacaagatgcactgctgaaggataacgagcgggttacagggggaatgactttgaaaaggaagcaaaatcatgcgtcttaatttacggcctttgtatcaacggatggtatcaaagggcatgtccatcggggaaggcattctgacgcagcactggcagcctcgctcaattcgggagaaatggctgattggtgccgccctctgtagcctgattttggggggatactattggggaatatggcagccgctaacccgacagatcgcgctgcaagaaggggtattgcaacagcaacgagcgttgattgccaaaatgcgcgccgctgcaccggaaattagcgcgtggcgacagcaaaccccatcagtggcaaagaacgcttctgttacctcattatcacaaagggtcagcaccagcgccgccgagcacaagattacgctgaagcgtattcaggagcgggaaggggtcgttcagatagggctggaacccttgccctttaattctctcttggattggttgaatggattacgtcagaagtcgggcgttcgggcggtgcagttggatattgtcgcggcagaccaacccggagttgtcaaagtgcagcggctggagctggcgaaaatctaagaagaccggttcagtgtttatcgctgaaaaattgtgaggtcagtgccgcaggtaaactgaacattagcggccagcgcgcgatgtaaaaatcattcgagccgatggtgtgcgtcagggaaagttaacctaagatttggcgcgcaaacgggcaagagtcgcaatgacgctgtttaggccgccaattcgccagcaacaacattggccgtttgtccagtcgcatgctgggattgcgcacctaatgccaaacttttagcataaaacccttcgttacatttaatagcttgctaagattcgtcctaaagccgcctttcccctgtggtttccgctgatttggcgtatttatcttattgctgtcctaaatgacattgtgcagactcactcccgataacagaggcgagtcacgcacgccgacgcccgaagttcaaacttacgaggccgctgtcagatttatcgccgttaggcgaaggtactgcggtacggagtctacggcataaattgcgtggtaacattttaggaggatttcctgtgaacaaatcaatgttagcaggcgtgggtattggtatagctgccgctctgggaattgccgccgtggcaagtatggatgttttttccagcggtcctcagtacgcacaggtgatagccgctacgccaataaaggaaacggttaaaacgccacgtaaagaatgccgcaatgttacggtaactcaccgtaaaccggtgcaggatgaaaaccaaattgcaggatcggtactcggcgcagtcgcaggcggggtattggggcatcaagtgggtggcggtcgcggtaaagatatcgccaccgtagcaggcgcgttagccgggggttacgccggtaaccgggtgcaaagcaatatgcaggaaagcgacacttacaccaccacgcagcagcgttgccagacggtgtatgacaaatcgcagaaaatgctgggatatgatgtcacctacaaaattggcgatcagcagggaaaaattcgtatggatcgtgatccaggtacgcagattcctgtcgataaaaatggtcaactgattctgagtaatcgagcataacgaaatatttgtggtccaagacctcgtaacaagagcccgcggtgtagtgttagttctgatcgtttaatagtcagtcggggtggttatccgcccctaccgttaagcgagtggcattagcattgacgcgggtttccttctgcctttcccgcgccaacactattccctacatcaattatctagataaattctttatatcaatagtcatcgaggccaccttataaccgcgtggttaagcgatacggtgctgttcgaaagaggccagtagttcctcaacaaatttcaaacgtttggtccgatcgcttaaatcctgcataaacttcagcttggttgggccttctaatcggaatatctgcggctgacgctgcaataaaccaatcagatacaccggatcgaccttgtttttctcgccgaactcgataaaaccaccgcgttcattgccttcaatccgtttaatgcccagtttttgcgcatgttgacgtaacgaagcggtttgcagcaggaatcgcgccgcatccggcaacagaccgaaacgatcgatcagttcgactttcagttcatccagctcgacgtcatcgcgggcgctggcgatacgcttatagaatgaaagcctgatatttacatcaggaataaaatcgtcgggcaacagcaccggcatacgcatttcgatttcggtctggttgctggtgagatcctccagcgacggttcgcgcccttctttcaatgcatcgaccgcgctttccaatagttccatatacaatgagaaaccaatggtcgtcatctggccgctttgatcttcccccaacagttcccccgcgccacgaatttccagatcgtgagtcgccaaagcgaaaccggcgccgagatcttccagtgaagcaatggcttccagccgttttttggcatcggtcgtcatggctttcggatttggcgtcagcaggtaagcgtaggcctggtggtgagaacgaccgacgcggcctcgtagctgatgcaactgcgccagaccgaagtggtcggctcgctcgataataatggtattggcgctaggaatatcaataccggtttcaataattgtggtgcagaccaaaacgttaaagcgttgatgatggaaatcattcatcacccgttccagatcccgctcacgcatctgaccgtggccgatagcaatgcgggcttctggcaccagttccgccaaacgttgggctgctttctcaatattttcaacgtcgttgtacagataataaacctgcccaccgcgtaatacttcacgcagaatggcctcgcggacgaccagattgtcgtattcgcgcacaaaggtttttaccgccaaacggcgcgctggcggcgtggcaataatcgacaggtcacgcataccgctcatcgccatattcagcgtgcggggaatcggcgtagcggtcagcgtcagaatgtccacatcggcgcgcatggccttgattcgctctttgtggcgcacgccaaagcggtgttcttcatccacaatcagcaggcccagatctttccagtgtaaatcactttgcagcaatttatgggtgccaatcagaatatcgattttcccttctgccgcctgctccagaatcacctgctgctcttttgcgctgcggaaacgagaaagcatttcgatacggaccggccaggtagcaaaacggtcgcggaaattatcaaaatgctgctgcgccagcagggtggtcggcactaatactgccacttgcttattattattcaccgcaaggaaagccgcgcgcattgccacttcggttttaccgaagccgacgtcaccacacaccagacggtccatcgccaacggttggcacatatcgctcagcaccgcattaatcgcctgttcctgatctggcgtggtttcaaacgggaagctttggcagaacagctgatattgttcgcgatcctgtttgaatttaaagccggacttcaccgcacgctgggcgtaaatatccagcagctcggcggctacgtcccgaactttctccgcagctttctgacgggcgcgggtccaagcgtcaccgcccagtttatgcagcggcgcgttttcatcggcaccgccagaataacggctgatgaggtgcagggaggatacaggcacatacagtttgtcttccccggcataggtcagaatcagatattctgctttgataccaccggcttccagcgttgtcagaccaagataacggccaacgccatgctccagatgcaccactggctggccgggacgcagttccgccagattgcgaatcagagtatcggtattaatagtgcggcgattatcctggcggcgacggcttacgcgttcaccgagcaaatcgctttcgcaaatcagcgctagctgacgaatatgatcgagaaaaccgcgttccgccgcaccgatcatcaaatagtgaccggtttttttcacttcatccaaacgggaaatcagcgtcgggcgtaatttaatccggcccagtaaatcctgtagggtttcgcgtcggccttcactttctaccgagaacactacgctgccgctgaagccttcaataaagcggcgcaggttatctaacggagctttcgcctgtgcctgtaccgcgacgtcaggcaacccctgataatccagattggtgttggcggcttttttcggcagaacgtcagttttaagttgaatgcgtggccagtctttgagctcgctaaacagaccgtcagtccgcagccacagggtttccggtgccagcaaaggccgcatggggtcaatgcgacggctttcataacgctgattgacatcctgccagaaacgctcggcggcggcttccagatcgccggtattcaccaataaggtgttgtccggcaggtagctaaatagggtgggtaacgcctgactgaaaaatagcggttgccagtactcaatacccgcaggccagatgcctttgctcacctgctggtaaatatgttcagggtcgcgtcggacttcaaactgctcgcgccactggctgcgaaatagctcaatggcggcctgatcaataggaaactcatgagcaggcaataaattgatgtgttccacttccgacagggtgcgttgagagtcaacgtcaaatacccgcaggctgtcgatttcatcatcaaaaaaatcaatgcgataaggttcttcgctgcccattggatataaatccaaaagcgctcctcgggtagcaaattcaccgtgttccatcacctgatctacgctgcggtagccagcttgctccaattgggaacgcagtttatcgcgagataaatgctggccttttttcatgaccagcgcgtgaccgtgcaggaattcgtgaggacagacccgctgcatcagcgtatttacaggaagaatgatcacgccgcgtttcatcgccggtaactgatacaggcaagataaacgggtggaaataatatcctgatggggggagaaactgtcgtaaggcagcgtttcccagtcggataaagtcgtgacgctgtgggcagtaaattgctgaatttcatcccgcaggcgcagggcattttgcatatccggcgcgattaacatcaccggtcccggatggcgttcaataatttcggcgcattcgatggcgcaggcagcgccggttaattggcctaactggcgtatatcgccacggcgctcaggtaatgagtaacggtattgttgggacataagcagttaagcaatctctttggttcagcactgcggcaataacgatattgcctatcctagcatgcgatgacgcaaggctgtggaattggcgctatttctggaataaaagccggagatataggctgttagtggttccataaagcggcggtacgctttattatcctcgatcactttgctttagcaacaggatctcaacagatttcatgtatcaacctgtcgcactatttattggcctgcgttatatgcgcgggcgtgcttctgaccgctttggccgctttgtttcctggctgtccaccattggcattactttgggcgtgatggcgctgataacggtgttatcggtgatgaacggctttgaacgggacttgcagaataatattctggggctgatgccacaggcgttgattactacgcccaaaggctctatcgacccggaaaaaatccccgcctcggcgctaaaagggctaagcggtgtcagcgatattgtgcctttgaccaccggtgaagtggtgttgcaaagcccgcgtagcgtgaacgtcggcgtgatgctgggtgtcaatcccgaacagcacgaacccttaaccaattcgctagtgaatgtacatctgcgtgatctgcaaccgggtcaatacaacctgattatgggtgaaaagctggcgggaaaactgggcgtgagtcgcggtgaaaccattcgcctgatggtgcccagtgccagccagtttacgccgatggggcgcattcccagccagcgtttgtttaacgtcattggcacttttgccgctggcagcgaagtggatgactatcaattgctggtgaatcagcaggatgcttctcgtctgatgcgttacccggcggggaatatcactggctggcgtttgttcctcgatcagccgttgcaggtggattctctcagccagcaaaacctgccggaaggcacggtgtggaaagactggcgcgagcgtaaaggcgaactgttccaggctgtacgcatggagaaaaacatgatggggctactgctgagcctgatcatcgccgttgctgcgtttaatattattacctcactgggattactggtgatggagaagcaaggggaagtggcgattctgcaaactcaagggcttacccgacgccagattatgctggtgtttatggtacaaggggccagcgccggggtgattggcgcgttgcttggcacgggcttaggcattttactcgccagccagctcaatgtgctgatgccggttctgggcctgttgctagacggcgcggcgctaccggttgccattaatccgctacaagtgacggtgattgcgctgttggctatggccattgcgttgctgtccacgctttatccttcctggcgcgctgccgccgctcaacccgctgaggctttacgttatgagtaaccaacctttattgcagtgcgaaaacctgtgcaaacgctatcaggaaggacaacttcataccgacgtattgcgtaatgtgacctttaccattcagccgggtgaaatgatggcgatcgtcggtagctccggctccggcaaaagtacgctgctgcatctgctgggcggattagattcgccaacctccggcgaagtcatttatcaggggcgctcactgagccagctttcttccgccgccaaagcggagttacgtaaccgcgaactcggttttatctaccagttccaccatttgcttccagactttaccgcgttggaaaacgtggcgatgccgctgttgatcggcgggactaaaccggcagaagcgcaagataaagcgcgtgccatgttggcggcggtggggctggagcagcgcagtcagcatcgtccttccgagctttccggcggtgaacgtcagcgcgtggcgattgcccgttcactggtgaataacccatcgctggtgttggcggatgagccaaccggcaacctcgatcagcgcaacgcagacagtattttcaatctgttaggtgagctgaacgtacgtcaggggactgcgtttctggtggttactcatgatttgcagttggcaaatcgcatgagccgccaactggaaatgcgtgacggtcagttacagcaaaatctgacgttggtgggagcggagtaatgcgcagttcacctctttcactgctaataggcttgcggtttagtcgtggtcgccgtcgcggcgggatggtatcgatgatttcgatcatttccactctgggcattgccttgggcgtcgcggtgctgattatcggcctgagtgcgatgaacggcttcgaacgtgagctgaaaaaccgcgttttggccgtggttccacacggtcagatagcttttctcgatcaaccgtttaacgcttggaatgcgagcctgcagcggatcgaaaaagtacccggcgtcgcggcggcggcaccctatattgatttcactggactgatggaaaacggcacccaattacgggcggtgcaggtcaagggcgtcaatccggagcaggaagaaaaactcagcgcgttaccacagttcgtgcagaacaacgcctggcaagattttcaggctggtcagcagcaggtgattttaggtaaagggctggcggacgcattaggggttaagcaaggttcctggctgacggtgatgatcccaaatagcgatccggaaatgaagctattgcagccgaagcgtattcgtctgcaagttgccggcgtgttccagctcagcggtcaactggatcacagtctggcgatggtgcccctcagcgatgcccagcaatatctggatatgggcgatagcgtgaccggtattgcactgaagtttaatgacgttttcaacgccaataatctcacgcgcagcgccgcagaagcctccaatgcttatgtgaattacagcagttggatcggcacttacggctatatgtatcgcgatattcaaatgattcgcaccattatgtatttagctatggtgctggtgatgggcgtggccagttttaacattgtgtctacgctggtgatggcggtcaaagataaaagcagtgatattgccgtgctgcgaactttgggtgccaaagacggcctgattcgggcaattttcatttggtatggcctgctggccgggctggtgggaagtatcagcggcgtggtggtcggtgttgtcgcttcattgcagttaaccaatattatcagtgggttggaaacgttgatcggtcatcatttcctgtccagcgatatttattttatcgattatctaccttcagaactgcattggttcgacgtggcctgcgtattagccacggccattgtgctaagtctggtggccagttggtatccggcccgtcgcgccagccgtattgacccagcgcgggtattaagcgggcagtaacagcgcgatcacaatagacgaggaatccggttgttttagccggaactgaatggtactgataaaccgtttactgaataaaggtaaagttatgtattacggttttgatatgggtggtaccaaaattgaaatgggcgtgtttgatgccgatttacagcgtatttggcaaaaacgtgttccaacgccaaaacaggattatcagcaattattgcaggtactgacggaactcacccacgaagccgatgagttttgcggcgcgcagggcagcgtagggatcggtattcctggtttacccaatgacgacggcacgttgtttaccgcgaacgtactggcggcaatgggcatgccgttgcaagccgatctttcccgtctgattgggcgggaagttcgtatcgataacgatgccaactgtttcgctttatccgaagcttgggatccagaattccagtcttatcccagcgtgctggggattatcctgggcaccggcgttggcggtggcattattctcaacggtcaggcgatgaccggacgtaaccatatcagcggtgagttcgggcactttcgcctgccaattgatgcgctcgacgttttgggtgcagatattccccgggttccctgcggttgcggccagtacggctgcattgaaaactatatttcaggccgtggttttgaatggatgtacgcccatttctacggtgaaacgctacccgctacgcgcattatcgaaaattactacgccggtaacgcacaggccacagagcatgtcgaacgttttatcgccgttctggcgatttgtctggggaatctgttgaccattattgacccacatttggttgtgataggcggcggattgtcgaactttgaacatctgtatcaggcattaccgcagcgtttagctgcgcatttgctccccgttgcgcgtttaccgcgtattgagaaagctcgctatggcgatgctggtggggtgcgtggcgcggcgttcttgcatctgtctgatagaaaaacattataaataaagtaaaagaggcaataggttatgcgcattcgccatcggctgtgtcggtttcgcaagaataagcatctgcgtcatcaacgttttcgctctcgtattttccaccgtgatagttccgccagtacagaaatgaagaaacctttcgtggtcgtactcaccggcgcaggtatttctgctgagtctggaattcgtacttttcgcgcggcggacggtctatgggaagaacataaagttgaagacgtggcgacgccggaaggctaccagcgcgatcctaaactggtgcaggctttttacaatgcgcgtcggcgccagctacagcaaccggaagtggcacccaatgctgcacatttcgcgctagcagatctggaggcggtattaggcgataatttcctgctggttacgcaaaatatcgatgatcttcatgagcgggctggcagtaaacgagtgattcatatgcacggtgaattactcaaagtacgctgtactcagtctggtcaggttctggattggccgggcgatcttagcgccgatgagcgttgtcattgctgccagttccctgcaccgctgcgcccgcatattgtgtggtttggtgaaatgccgatggggatggatgatatttatcaggcgttggctgaggctgatttctttatttccattggtacctccggccatgtttatccggcggcaggttttgtacatgaatcggcgttgaatggcgctcatactgtagaactgaatctggagccgagtcaggtagaaagccagttcgaggaaaaacattacggcttagccagtaaagtggtgccggagtatatccgcgagtttcttaccactcgcggagaaaaccgcgaaggcgaataatttcctcagggattactgcgtttttttatgcagggacatcttggcaatgtccctgtgtcatttctgtcatagcgttattattctggcttaagtttgtttaaaactgacctgacgcaatatttgatcgtgatcacttccccataatgatatccatcattttgagggtgggaaccatggacaaattactcgatcgcttttttaactatgtctctttcgatacacaatcaaaagctaaggtaaaatccgtgccgagcaccgatgggcaacgtaagctggcggcagcgttgcaacaagagctgctggccttgggctttgagccggtgaccttgagcgagcacggctgcgtgatggcaactttaccggcgaacgttgactgggaagtgcccacaatcggttttattgcccatttggataccgcacctgatttcagtggcaaaaatgtcaatccgcaaattgtggagaactatcgcggcggcgatatcgcgctgggcatgggcgatgaaattctgtcgccggtcatgttcccagtgttgcaccagttgcttggacacactctgattaccaccgacggtaaaaccttactgggtgccgatgataaggctggtattgccgaaatcatcaccgctattgtgcgtctcaaagagaacaatattccccacggcaagattcgagtggcgtttacgccggatgaagaagtgggaaaaggcgcgcaattctttgatgtaaatgcttttaacgccgattgggcctataccgtggacgggggcggcgtgggcgagctggaatatgaaaacttcaatgcggcctcggtgaccatcaaaattgtcggcaataatgtccatcccggcagtgccaaaggggtcatggtcaatgcgctgtcattggctactcgttatcatcaatcgcttccggcagatgaaaccccagaaaataccgagggttatcagggtttttaccatcttcaaagcattaaaggcacggtagaacgggctgaaatgcattatattctgcgcgatttcagccgcgatggcttcgaagctcgtaagaaaaacatggtggatattgccaaacaggtcggtaaagggttacatcgcgattgctacatcgaaatcattatcgatgacagttattacaatatgcgtgaacacatagtggagcatccgcatattattgaactggcgcagcaggcgatgcgtgattgcgatatcgaacctattatgaaaccgattcgtggaggcaccgatggcgctcagctgtcgttccgcggtttgccttgcccgaatatttttaccggcggttataatttccatggaaaacatgaatttattacgcaggaaggaatggaacaggcggtgtcggttattatgcgtatcgccgaattaaccgcgctacgggccaaaaacgctgaaccgcagagcgagaaaaacgcagctttgatgaaatgatattgcgataaataaaggcgtgtttcgtatagattcgcccaataaaaacgccccttaggtcaaaacccgaggggcgtttttttagctttaaactgccggatatctcacaagttaatcgcggaaataccagtagccgctgttaaccagctcggtcagcgtcgccaagaaggacggctcgtctaacgcatcaccgagcatttcggcgctaacgctaaagtgttggcacaacgcatcggccgcaggcaggtgcggagtatcgatcaattcgccgttaacaaagcaattatcacctaggcgaataacccgcagtccgctcaggcgatgtaactcttcaccttggctcagcaactcatagatctcaccagcctgataaggcggttccggtggcgaaatatccagttcatggcgagactgggacacgaactcgccgaaccagtgttggaaatgctcaggctgttggaacaattccagcatcatttggcgcagcgtatccatttcctctggcaatacgtccgccggacgattacgcagtttcagatctggatcgctataacgcttgctgcctaactctctggccagcacgtaatcggcaaagccgctgaccagttcccggccgttaggcgcacggaacccgacggaatagttcagcgcgttttccaacgcgtagccttcgtgcgggaatccaggcggaatatacagaatatcgcccggctccatttcttcatcgataatggcgtcgaatgggccgacttgcagtaaatcaggatgaggacagtgctgtttcatcggcactttttcacctacgcgccaacggcggcgacccgtaccctgaataataaatacgtcatattgatcaaaatgagggccaacgccaccgcccggtacggaataggagatcatcagatcatccattcgccagtctgatagcgcacggaacggacgcatcagcgctgccgatggctcatgccaatgatcgacggcctgaaccagcagagaccaattggtttcccctaaatgatcgtagctctcgaacggcccgtggctgacctgccagcgaccttcctgatggctgaccaaacggctatccacctccgtttccatagccagaccggctaattcatcgggagatagggggtcgataaagtttttaaagccgcgtttcaggatcacggggcgcttttgccaatagcgttgcaggaagtcttgccaatccagatcgagttggtaatccattttttatcccagggattgagtgaacttgcgaatgattataacggatggcgcgtgacagtatcaggggcagggcggcaaattttgtaggaatggcactggatgcagaaaatgcggacgattctctgcgtccgcacagagcatttgagaaatttatttggcaaatgaatccggttatgaattattcgtcgtgatgctgatcttgctgtcgcccaaaggttaccagcattttggctccgcctaagggactgtcggtaacggaaattcgcccctggtactgttcaataatttctgccgcgacggataatcccagcccttgcccaggacgtaaggtatcaacccgctgaccgcgttggaaaatcacttcgcgcttgctctccggaatgccagggccgtcatcgtccacaacgatggtgagttgtttttccgagtgcagggcggtaatttccacgaactcgagacagtatttgcaggcattttccagcacgttgcccatcacttccataaagtcgtttttctcccccataaaggtgacctcgggggagatatccagagtgagtacgacgcctttacgctgataaaccttgtttaatgcactgcataaactatctaaaagcgccggaactgaatggatttcccgagctaatacattgtgttcagagcgcatgctagcgcgatggagataatagccaatctgctgggagattcggctaatttgttccagcatgataggctccacttcttcgatagtggcctgtttgccggagcgcaacgagcgcagcgtggtttgcagcaccgccagcggggttttaagactgtgggtcagatcggaaagtgttgtgcgatatttggtatagcgctggcgctcgttggtcagcaaaatattcaggtttcgcaccaagctgagcaactcgcgcggcggattttcatccaactgttcccgctcgcctttttccagctggctgatttggctgaccaaagctttgatagggcgcaggctccagtacgccgccagccacaacagggggacgaccaacaacaggttggcgagcagtacataactaaaccagttccataccatatccgaacgctgtagctcttgcggaatagtatctaccaccacaatggttaaagcgggaaggcgttcggtcgcctgatatgcgttgacggaaaccgagtgcgttagcgcgctggcgtcggtgtcgtcgtatttcttcagctgatcctgcgctttggggttgtcccctaataccgcgctactgatttcggtaccggtatccaactcatagaacccgggtttgctaagccagcttttctgaatatgagattccagttcaggcacatggcgctgtcgccacagaatgttgccgttatggtcataaatcagtaccagcgtaggaacattcagctccagctcgggaggaatggtaatgctgagtttgttgtcatgccattgagccagactaaagaacagattgctttccccccgatgagcgcggaaggtgtttttatcgaagctaacaatatagcccaccaccgctaccattccgtaggacagcgaaagcgctagaatcacgcccgccgtagccatcaggaagcgggcgcgcagggagaaaggtttactgttcgatttaaacatggcgattagttggcatcaaaccggtagccttggccacggatagtggtgataacttctttttcgtgttcggcctgcaattttttgcgcaaacggcccattaatacatcgatggtatggctttcgcgtagttcagcgtcggggtagagctgtagcatcagcgtgtctttactgacgactttgcccgcgtttcgaatcaaagtttcgataatggtgtattcaaaagcggtcagtttgatttgttgctgattcacgcacagttcacggcgagagagatcgataaggaacggcgggaattcgataatctgcgaggccagaccgctgttgcggcgcatcaatgcctgcatacgggcaatgacttcttccagatgaaagggcttggtgacgtaatcgtcggcaccggcttccagtaccgccactttatcctgccagctttcacgggcggttaataccaaaatgggcaacttggtttgatgactacgccagcggcgartcaggcttagcccgtcttcacccggcaggccgagatcgataatggcgatatccggagcatgttcctgcaaaaaatagtcggcttctttcgcatcttcggcggcatcgacctggtgtcccatctcgcgcatctgtaccgaaaggtgatgacgcagtagagcattatcttctacgactaaaacgcgcataccaaattcctcaaaaaacttgaaccgggtaaaaacttacccggaaaaataagggtgagattgatggatcagaaagtataacgcaaaccaacctgaccaatctgatcgtctaccttccagttatggtaggtataaccgacttcagccgccagactttgcgttagggcatagctcgcctcaatacgtgcttcgtgatacatcttgctatcatattccgccaggcgataggcaacgtctaagccaatgtcctgggtcaatttagtcttgataccgacttcaccggtcgcgctgttgtaagcttctgttttatcgccatctttcttaacatcgtacagcattgcgtggcggcttgcaccggccagcaggtacatatccgcatctggcgtcagagcaaaatgataacccacgccaagcaaaccatcgcccataccgcgatcgttatctgcgatagcgcywwgsckwkykgccatgaacagattgttttcaaagccataaccgccgtttaagtagaaaccgtgcattttgtcgctaccaatgtggctggtgccagattggttaaattgcttatcgaaactttgcttattatcaatggaaccgaattgaatacccccggcgataaaggtgtaatcatccgcgatagccaaagtgctagtagcgataagtgccgctgctaataaagattttctgaacataactgctcctatgatagttattccctggatgtccgcaggcaattatcaacgggagaaactaaacctttattcaacaagggggcagtgtaagtaaatgatagttaaacggcagagcgtcggatactgaaaaataagcaggcgacggggagccgcctgctgcaaagacttacttcagttcatccaccagtgcgacggcacggccaatataattggctggcgtcatggttttcaaacgaactttttcttcttctggcagcgccaagccatcgataaaggcttgcataccggcggcgtcaacacgtttgcctcgcgtcagctctttcagtttttcgtatggtttttcaatgccataacgacgcataaccgtttgaatcggctcggccagcacttcccagttatgatccaattcgtccaacagatgaggttcgttaacttccagcttgctgatgcctttcatcgttgactgataggcgatcaacgcgtagcccagacccacgccgaggttacgcagcacggttgagtcggtcaggtcgcgctgccagcgggaaaccggcagtttgcttgccagatgccccaatacggcgttagaaagacccagattaccttcggagttttcgaagtcgatcgggttaactttgtgcggcatggtggaagaaccgatttcacctgcaatagttttttgtttgaagtgattgagtgcgatgtaaccccaaatatcacgatcgaaatcgatcaaaatagtgttaaagcgcgctacgcagtcaaacaattcggcgatgtaatcgtgtggctcgatttgtgtggtgtacgggttccagttgatgcccagcgaggtcacgaagctctcgctaaactggtgccagtcaacttccggataagccacgatgtgagcgttatagttgccgacggcgccgttaattttgcccagaatttcaacctgagacagctgacggaactggcgctccatacggtaagccacgttcgccatttctttgccaacggtggatggcgttgcaggctggccgtgagttcgggacaacagcggcaaatcgcgatattggtgggccagtgctttgatggcgtcgatcatctggcgccagaaaggtaaaatcacttcctgacgagcggtttgcagcatcagagcgtgagacaggttattgatatcttctgaagtacaagcaaagtgaatgaattctgacactgcatgcagtgcaggaatgctttcaactttctctttcagaaaatattcaaccgctttgacgtcatggttagtggtgcgttcgatggccttaatgcgcagggcatcctgttcattgaactctgccacgatcttgtcgaggtaagcgtttgcgttggcatcaaaagcagggacttctttaatttctgcgcaggctgccagtttttgcagccaacgtacttcgacctgcacgcggaatttcagcaaaccaaattcgctgaagatagcgcgcagtgcgctgactttgtcgccgtagcgtccatcaattggggatacggcggtcagtgaggataattccatcggtagcaactcctgggatcaaatattaacgatgagcaagaatactctgcgcctgcttaaacagacgattacgagaaaacataagctgtaaacggcttccacctacctgttgccacagcaccgcagagcggataccggctaacagggcggcgcgaactttggcctggattaaggtgctttgcagcatggccgggttgccggtaacctgaatgcgcggcccaagtgggctaattacatccacataaatggcggccagagcgctcatcatagtctctgattcgagatcaaaatgagcgagctgacgatctaactgactgatacgttcgcccaaggtgctcatggctgactggtgagcatttagcttccgctccaataccatcaggctcagagcgtaacgcgtcagttcggcgctagggccttggcggttggcattcagcactacctgcaaggtttccagccccatggtgaggaatttctcatctccaccgtacaccgcaagagtcgaatcgggattggtcagcagcacgctgttgagtgaagtatgcagtgcctcgttgtcgcattgaccttcgtgagccagttgctgaaccagacgcgcagactggcagatacctgccagcgccagcgtgatgtcgtaataattctttgccacgattgctcctgtcgagattattggtcgctaacggggtgacgtgattcgatgataccgccgccgagacagatttcgccctgataaaacaccgcggactgaccgggggtaacggcggcaaccggattgtcgaaacgcacatcgatacgttcgtcatccaacggcgtaaccgtgcaaggaatatcttgctggcggtaacgggttttcaccacgcagcggaatggagccgtaaccggttcgcgatcgacccaatgtaattgctgagcaatcaaaccggtagacatcaaacgcgggtgctcatggccttgggctacaatcagcaagttgttggcaacgtctttatccaccacataccacgggtcatcgccaccttctttggtgccgccgatacccagacctttacgctggcccagagtgtggtacatcaaaccttggtgttcgccgacgtgtttgccttcaacggtcataatcgggccgggttgagcaggcaggtaacggccgaggaaatcgcgaaatttccgctcgccgataaagcagataccggttgagtctttcttcttggcggtaaccagatccagctcttccgcgatacggcggacttccggtttttccagttcgccaaccgggaacaggctttgcgccaattgatcgtggcccagcgtatataagaagtagctttggtctttattgccatccagaccgcgcagcagttggcttttgccattgacatcgtggcgacgaacatagtggccggtggcgatgtaatcggcgcccagatcttcggcggcaaattcaaggaaggctttaaatttgatttctttattgcacagaatatccggatttggcgtgcgcccagccttgtactcttcgaggaagagttcaaaaacattatcccaatattctgcggcgaaattgacggtgtgtaactccatgcccagcttatcgcacactgcctgagcatcggccaaatcggtcgctgcggagcaatattcttcatcgtcgtcttcttcccagttcttcatgaacaggccttcaacctgatagccctgttgttgtagcaggtaagctgaaacggacgaatcgacaccgccggacataccgacgattacttttttctggctgttatctgacatgggagtctcactaacttaagcgccgagcgtgctgacaatggataatccgtttcgcattgcgcggcaaacaaggcattacaaaaacaagcgtcggattttatcacgttgcctgtcggggcgcaccgcacaatcacggcttagggtaaattacgccaattaattatcgggctgaatcaatgtggccagttaaaggtactaattagatcgagcgagtagcgctcaggctgcaaataacagcggatactttcggcaaccagaggagagcgcagattgggtgcgtgcaatatttcatcggcggttagccacaggcagcgatcgatatcgctatcgtgaggctgagtaggcaaaatggttaccagttcaatcacaaaggcgaagcgtaggaacggcgtattatcgggtgcaacccattgatgcatccgtaaaaaggattgaggcgtcgcgcgaataccggtttcttcccacagttcgcgttctgcggcctgtagcaaggtttcatcggcttccaaatgaccggccggttggttccacagcgctttgccattaatagtttcttcaaccactaaaaacttgtcttgagaatgcaccacgcaggccacggtaacatgaggtttaaacatcgttaatctccttccattggccgggttgtaaatctcccaggctaagattacccatactaaaacgaatcagtcgcagggtaggaaaaccgacgtgggcggtcattctgcgtacctgacgattgcgtccttcgtacagggttattttcagccaacgggtcgggatagatttgcgctcccgaattggcggatttcttggccacagccactccggttccggcactttttcagcgccagcgggaagcgtggggccatcttttaacgtcacgccctgacgtaaacggcgaagtgcttcttcgtccggttcaccttcaacctgaacataatagaccttaccggtttttttccccggttgcgtcagttttgcctgtaatttcccatcgttagtcagaaccagcaaaccttcgctatctctatccaaacgaccggcggcataaacatcattaaaaggaataaaacccttcaatgttgcccgtccagcctcatcggtaaactgtggtaacacatcaaatggcttattcattaacaccacgcgacgtgggccttgcaccggcgcaggtttcgcctgtgagcgggagctgaatcggttaactttgtgatttttaacagagattttattcatgatgattgcgcttccagttgattagcgcattatacatcaatccgttttggattggcgtgaaacgaatattcaagtactattgacaagaatcttacaaggcattaacaaaaattgcgctgaaggagaggttgatggaaagcaaagtagttgttccggcagaaggtaaaaaaattacggtcgacgctaagggtaaattagtcgttcctaataacccgatcattccgttcattgaaggcgacggcattggcgttgacgtgactcctgctatgatcaacgtagtggatgcagcggttaagaaggcctataacggcgagcgtaaaatctcctggatggaaatttacaccggtgagaagtcaactcaggtttacggtaaagatgtctggctgccagaagaaactctggatctgatccgcgattatcgcgttgccatcaaaggcccattgaccactccggttggcggcggtattcgttctctgaacgtggctctgcgtcaacagcttgatctgtatatttgcctgcgtccggtacgttattacgaaggcaccccaagcccggtaaaacacccagaactgactgatatggtgattttccgcgaaaacgccgaagatatctatgccggtattgagtggaaggccggttcaccagaagctgagaaagtgatcaagttcctgcgtgacgaaatgggtgtgaagaaaattcgcttccctgaacaatgcggtatcggtgtaaaaccttgttcagaagaaggcactaaacgtctggtgcgtgcggcgattgagtatgcaatcgacaacgatcgtgaatcagttactctggttcacaaaggcaacattatgaaattcaccgaaggcgctttcaaagactggggttaccagttggcgcgtgaggaatttggtggtgagctgatcgacggcggcccgtgggttaagattaagaacccaaaaaatggcaaagatatcatcgttaaagacgttatcgccgatgccttcttacagcaaatcttgctgcgtccggctgaatacgatgttatcgcctgtatgaacctcaacggcgactatatttctgatgctttggctgcacaggtcggcggtattggtattgctccgggtgccaacatcggtgacgaatgcgcgctgtttgaagcgacccacggcacggcacctaagtatgctggtcaggataaagtgaacccaggttctattattctctccgcagaaatgatgctgcgtcatatgggctggactgaagccgctgatttaatcattaaaggcactgaaggcgcgattcaggccaagacagtgacttatgacttcgaacgtttgatggaaggcgctaagctgctgaaatgctcagagtttggcaacgctatcattaaacacatgtgatattgacatgtctataaaacttcacgggagcttatgcttccgtgggttttccaactacttagtatttcttctgcaaaactcctgcaaaaccctcctgcaaaactgtacaaaaaacaccctcaattaaacagctaataccagccattctttacccctatcatcattatatttatcagtcatagcctgatttttatgtccgagtaatgttttagtatccactccttgttctcgatataaccgctctgctagggatcgctgttcatggaaagtaggtggggtaccctctttccattgcaatccacttttatctctggccgccgaaaatccggtagtgattgcgttgctagatacttgaccaccacgtttagccattgatgttgtatgatgataatgaagcatgtacggactaacgatcatattgcgacaccgtgctataacatcttgcagcgtataaccgacagtctcacattttaaggttatgggtatggctattctggtgcccgttttttcctgcacgatatgaaggtgattatcccaaacatcgctaaatttcatgccagcgatgtcacctaagcgctgaccggtaaccaaagcaagaagcattgcattttggatataaccttgcatattggcagcggcattaaatattgactcccattcatcaaagttcaagcgaatacgggtaaccttgtttgctggttgcttggtggccagagcagggttatagccaggcggcacctccccagcgtgttgagcttctttgtacacatcgatcagcaccatccgaacaacctgcgccatccgtttttgccccttctccttatactcttcaatgacaaaggctatatctctagcgccaacatcaggaagggttagcattccacaatgacgtctgaacgcttcgactggtgcatttttttgcttaagtgtgttgagttttatttcctcactgtcgtaacgttctttctggatagtgagatagcgatccagccaagagttaactgttattgccttaccagttttgagactgatctcatctcgcgctttgagcaattgccccatttgttgacgggcaaaacggctattagcctcaatagcgatagcctttgctgcagcctcatcatcacctaatccatgaaatttacgggtaataggatgcttataacgccagtagacctttttagttctggcgtcggtatagcacgatagacccggtacatttatgttgtacttacgaggtctggccatcttccattatcctcttcaaccttaaatcatcatctttcttcactgccggtttgacggtcacgccgacaaatcgtgcgttcttgtccactcgccagcacctgccagctttaaacggtggcggtgagatcatgccatgttgcgcatattttagtaacgttggatagctggggatcggctcgtcaaactcctcggcggcccatacatccaaagtctgagttctagccataattagccgccttgcttatctgtagggtaaaacgtttctgaatattttgacggatagtccgccaagtagtcgcttaatgtccgtgaacaattctattcgctatcctggctggtggctgttatcaggcgctgataaatggctgatacatatcttgcctggtgcaacgcatcggccagtgcattgtgccgttcgccgtcaaaaggcatatcgcgcttgggatcaaagccgattgctcgccccagttttacgatggtgcgtacgtcgagatcattaaaccagctccaacatggtgacatctggcaacgctcatacgccgcacgcaaaataacgttgtcgaacgctgcgccattaccccagacgtgtaagtatctggtgcttgggcaatgttcagaagcaaattgatttaagttcaataaagctgctctgatcggcgttgggtcataggcaatcgctgaacgtgcctcactgctttgggttagccaccaaagaatggtgctagcatcagcgatggcaccgagggacatttcactttcgagatcgaccgcggtataaaattcagcgccaatttcgccggtagccggttcaaagaatactgcgccgatcgccactatcggggcgttaggcttgttgcccatagtttccaggtcgatcattaggtttttcatttattttccttggttgcttaaatagagaatgccatcgaccggcaggcattcatattcaggtggcaggccttgctgttgaatgtcagccaggcagtttttatcatcgggatagatatagccttgcggttcgtactggcagggctggaaggtgtagcagaccagcagaaacagtccgacactcataggctttgcccttcgccaaccagttcgttgtaacgctggataaacatggcgcgagcctgaacggagccaacgggaataatggcgatgtcttctgacggtgggatgccttcgagcatcggccagactttgccatcatctatatccagatcccggcgttcggtggccagcatgaccaggtcggcataatggacagaaaaacccatctcatcaggcagcccaaatttctcccggataaccaaatcaatctggcgttctacggcttggtaatcaggcaataagcgtttaagaggggagggaatatctttgcagtaggcttcgctggcatcatgcaacaaggcttcaagggcaaactcagcaccgataatctgactcatcagcacactgtgctgcgccacgctgtagaaatttggcaggtgaccagcaaaacggcattcatgtgataacgcctgtgcaatatcttcaatacaaatactttctgcagtcggttttgaataatcaaaacgctgaccggaaaacgttgtaatacacgtcataaatatactccacacggtttttaggtaatactccaccaaataccccatcgctgggatatttgaggttgtactaataattaatgtttatgcgttaaaattaccgataaatgtttctacttctacgccgtcaaatttcgcaattaatagatcgcgaaattcctgcgctattttttcttgctcgccttccaactgaacaatgcgcaaaaccagaaccggcacatcaccgccagtcaggatactgtagcgtaatttaaatcgacgctcgccaagcccttcgtatggcacacatttaaactcaaaggtggcaggcataatatctttgctctttgcttctacggtttccataacggaacgcttaccgctgaaatcgttgtcttcatgatcggatgaactggttgattcaatggtaatgcggcgtactgcgcctacagcttgtcggatatctaatacaacaccatcagcatcaaaggccataaggtattcgcgccagtcttccagccactcggccagctctttctggcgcttcttctgaccatcaatagccagtaactcacggaatggggcggtttttttgagagataaattggcggtgttatccgcatgaccaggttcttcaagtgtaccgaggttaaacacggtcttggcactcatatcatcggcatcgataaagcaacgcacaccattacctgcgtaaccagaggaatatttcacatactcatcaatgctgctggtttttaagttgccacggaaacggaagcgaccgttctggaatttttcgaggctgtgaacagtaacatcattgggcaaagcaatagtcaaacaatcagcagaagataatttcgcttccacttgagtcgtcattgccatattgcgaatttcttgaattgcagacgagtttaatgcttgagacatattaagtccttaatataaataataagttaaatagcaagatggatttaaattggttgcgtttaattaacggtttttaatcttccgtcagtctcgcctttaatagtgaatagctggccttggtcttcctgcataattgccagcttaccgcctttacctacatacattggtgtttcggtagtatcttcttcggacgatttaccgcgtggcgtcggggttgtaaatttcagtttatgggcaatcatgacgcgcttttcttccattgagttgctgatccgcgacagatcaaactcaacgatgactttacctttgccgccattattcagaacgcctaatgccgccgcattcaacgctgctgatattttgttttcaaaaataccggcatccaactcaccgagaaaatccggcacattggtttttctatcttcactactcatcggggtgaccctcagttacgcagtgcaacactgcagttagttactccacacacatagagaagagcaccggaacgggggctttatactgtacaggttaaaagggataacccgtccggagcacttctctgtgtgaaaagggcggctggcctaatctggtgttggcaggcgcagccgcaaaagacacagcacagcaatggaactcaaatctgtgcctggttacttctccacctcaggcggcggtggtatcctcaaagtccctacaacaaggaggatttttctgtgaacaatgaaaatataaacattcgtcttaaagctatggaacttgccattacgcgtcttgcaacttcaattactgaaaatggcgggccatcatctacagatctagaaggacacattctttattttcgagagcgtcttggtcgtggtgatttagaacctcaacaagaactgattttcaaacaaacactggcgctgcttgatccgctatcaccaaaaccaggcgacctgttttaattatccgtttcacaaaggcttttactggtgtaataaccacgcttcacggctgcttgattactcagcatcgactcagcgaggcgtatgttttggttggtttttgcattaggtttaagtttctggagttctttggagtcctcgagcaacaaacgaatcaatgcaatttcacattcattaatagcctggtatttaagcccggaaggtaggttaaatgtcctgccttcaagtttatcgctatcttttttgctgatttccatcctgattactccacactgttaaccctactaagcgaatcatccgatgtttctatgccaccggcagctactacgtgggcgtcctgctgtaagtatcccagctttagttccacacactttttgagatttccggtttctcagccatcagccgatattcttccggcgtcagattattcagggattcatgaggccgctcactgttgtattcattcagccagcgctccgttatttcccgtgcttcattcagtgttctgaacagataaaaatccagtatttcggtccggtacgttcggttaaaccgttcgataaacgcgttctgtgttggtttgccgggcttgataaattccagcatcacgccatggtcttcagcccattgtgccagcgccagtgatatcaattccggcccgttatccatccgcatcttcagcggatagccacggtttgccgctattctgtccagcacccgcacaatgcgctgcgccggaatattcaggtcaatttcgatagccagagcctcgcggttaaaatcatccacgacgttgaaggtccgaaaacgtcggccacatgtcagcgcgtcgtgcataaaatcaatcgaccagctttggttgagggcttccggcgtggccagcggcgccggattacgcaccggcaggcgttgtttccctttacgacgaaaattcagttttagcagacagtaaatccggtgtatgcgcttgtggttccaggcgtatccctgcctgcgaagcacctgaaaaagcttcttaaatccatagcggggatagcgttcagccgcctcagtcagcctctggatcaccggttcatcacgtcgtgtattcggttgataacgaaacaccgtcctgctcagcgataacgtcctgcatgcctggcgtatgctcatcgtaaactgcgtggtcagatagttgacgagctcacgctttatcgctggttttaaagctttttttcgatgacgtctttcagcgcacggcattccagactcaggtcggcaaacatctgcttcagacggcgattctcgtcttctagatctttgatttttttgatatcagcggcttccatcccgccatatttcgccttccaattgtaatagctggcttcggaaatagcagcctcgcggcacacatctttgacggtcctacccgcttcgacggacttcagtacggcgatgatctggtgctcggtaaatcggatcttgcgcataaggatctcctcaggtgacatcatcagtatgtcggaagatctctaaaagtgaatgggccgtttaagcgggatacttacactgcctgttcgctgttgatgaacgtaattaaacacctaggttgtttttgtgtcaacaactttggttgtattttgctttgttggttgtttttttgttggttttaaaatagaaatttgatgggaatgtttcaaagattttagaggtgaatcaaagaatcgctgcgaattggactgattaagagtagacgtttacgtggctccccaagtaaggggagccagagaatggtgggtgcttctactttttcttatttctgaaattatcatcattcatacagtaattgtatgaatccaagattagccctgataatcgtagaatgttctcaggacgatctattatgatttgattgccaggagccacttccagtccagctcgttcaacttctgcgatagctttttcatctagctcaattggtagaattattgttggtcgctgtttgctatcgaaataacgcacaagccaacggtttgattttccttggcaaagaatattatagtaactagctgtatcttttgccgaaatatcagcctgttcaccaagtaataattgaatattactaaaaaataatctttcgttatgcgtagtaactatatttgaattttctgggtctacgactggcgctgtttcatctgttattttcatttctggcgctagtacagtttcaatatttttgtctttgttggaagccattgatagcccagaaacgaccatcgcactgactgctcgctctactgccatttttactaatggtgtgatggtgtcgaggaatttttgatttaactgtcgttgtacgctggagcgacttgcaacataacgaacaaaatcagcatcaacatttcttaaactatcactgataacatcggtgaatgctgataagtaaatgctttcttcagccaaggttctaagtgcttctggttggaactgatcgtggcggaattgatatagctgatgtgcatcagaatcagatgcttcatccacatcaatctgtaggaatggagaggcatccataatatttctttgcttaagatcagtaaagaaacgccattgtgtgccattagttatggctgcaatggtgacttcaggtgtagcgttaaaatatctagaaagctgaggacaatggttatcaagtttttgattataacccttagcctcaatgaacattacaggaacaccatggcaaaacagagcatagtcgactcgctcacctactttaactccaggaaaatcagcaccatactcagctttaacttttgtggggtcataagagttaaaaccaagaatatctaacattggtaatattaatgcttgtttcgtagtttcttcggtagaacagtgatggctcacttttttgacatgatcagagtgcgctcttaatttctcagcgaatatcttcatattttcctttaactcttagtttgaatgacactcttaccctcattggactacttagaagtgagagctatcaataatccagaactgaccaccaaaaaacgcggccaataatttctacggtttctccatcagcatcttcgtcagggtgttctcctttattaaagctgcggatacttagtttatttcctggcatacgatataaaagtttaaggcgctttaatccgtcttgattgattgcatatattttgccatcgacaatttttttatttgcgcaatcaacagctactgtcgtgccatttggcaagatcggctccatgctatttccatgagctggaaaacaaaggacattctctttctgagcaccaactcggcgcaaagttgatttagaaaagcgaagtttgaaaccattgtagtcttgatcgcagaaactaccgtcaccagcagcaagttcaatatcacgtaggtagggcacttcaacctcgtcttcggggatcgggcatttactatcccaaggagcaatattgccccattcatgttcaggagggatattggattccttacctataagaacgttggattccttcatcggtggaacgccttctccaagccattctgggcgaacttgaagtgcacgggatatttccagtagcttagtcgtgctctggcttttaccggatgtgattttttgtatagcagcttgagaaactccagccttctcagctaatgcagcttgagttagtccagaatctttcatcgctgttttcaatctttgtgcaagtgtcatttccattctcgcgaaaatacaacctaagttatacccagtcaaaccactattgttgttgccgcaaaacaaccttagttgtatattgattgaaaaatacaaccaaggtgatttgatgaataatgtaattaaaatggcaattagaatcgttgggactcaaaagggtcttgctgaggcatgtggtgttacccaagctgccgtccaaaaatggttaagcggtaagacaaaagtggcaccaagaaatgttaaatcacttgttgaggccacaaatggtgaagttcaagcacaccaagttcgtcccgatctacctaatctatttcctcatcctgacttaaatgcgattcgcactacagaggaactatctgtaagtactgagttaaataaaaccaccaatcaggaataactattgtggataacagaaatttcccaacccctgatgacattagcgcatctatacacgctctcatcaccgcaacacccggtggttatgaacgcctggcagatgaactccatgcgggagcaagccacaacgcattgaggaatagagtccgtcaacatgcagggcaagcggtaccgattggtatggcgatcacgctggagcagattagcggtcgtactgatatcactgaagctatgtgtaaacgtgctggtggagtgttcgtcaaattgccggatgtgacccagatgggcaatgaagagctgctgattaaattcaacgagctattggctgctttgggagagtttggtcgggcgcataacgagtttacggctgatggtgttttagatcggcaggaaagtaagcggttaaaagctaaggggtacagggcgcagtcgattattgcagagattttggtggtaaccgaattgttgtggggtgacgccacagattcgcggtctgtggcgtcgggtgcattaactaaacgtgtggagtaattaacgcatgaacattgtaactgctaaacgttctatcccgcaacttcgttgcttacctgctgttgggatggagccattttgttatgtgttgagaatacccggcctttggatatgtgtcacccacagcgccgctgattatgttgtggatacattccgctatccggcactgcccgcgccaaaggtggcttgatatggctgaacaatttgaagaactggatcggcattatgtcgataagcgcggtgtacgtgttcacgttatctgtttcaaccggttaagccgtcaggttatttatcgccgtgcaggttacgagcatgaactgtgtaagccgctggcgcgtttcagaaaagaatttaagcaggtgggtgtatgagcgtaaagctatccagttatgtgtgggacggctgtgcggcggcgggaatgaagatagctaaggttgccatcatggctcgcttggctgacttctcgaacgatgaaggtgtgtgctggccatcggtgacaactatctcgcgccaaattggtgcaggtgagagcacagtacgtacagctatcggtgaattggaacgtgatggctggttgatgaagaagacacgccgagtcggcaaccgcaacgccagtaacgtctatcagttgaatgtcgtcaaacttcgggctgcggctcacgcgtcagaatatgacacctcaaaatctgatgggtcaaaatctgacgcatcaaaattcgacgggtcagaatctggcaaaaatagccgttttgacccgccagaatctgggggcgatccgttagtaaattcaaaacaagatccgtcagataaaaagactgttggccagccgccgatggccgccgacccgcagcaggttgataaattaaaaattgattacccaaaagtcctagaggcgtatcacagcattctccctgaaatgcctaacgtcgtggacatgaccgctgaccggcaaaccaagctacgcaaactctggaagaaattcgatttcaatcaggaacgctgggcggcttacctgcgctatatctctaaacattgccgttggatgctggaagaccggccaaatgcagcagctggaacaacgtggcgtcgcaagaattttgactacctgattaccgaaaaatgttacatcgctgttaaagaagagcgggctaacgatttgccaaaagtggcgcgtatcgactctgctggccgagacgaggcatttggccgcttggtttcacagcgttgtaagcctcagaacaccgttgaagaactggcgataacgactgcaaaacgtgcagggcttggtcggatgaacgaagtcatggctcgatcagcatggaaaaacatctgggcagaagcgcaaaccacggcgagtgaaaacgaattgaaggagctggcgtcatgattgattttactcaaacccagtatgttcaggatctggaagcacttaaatcgggtgaaagtcattttttaaaaaaggttggtgatcagtggcgcacccccgatgcattgttctggggtatcaatcagatgtttggcccattggttctcgatttattcagcgacggcgataacagcaagtgtcctgattactacacggcggaagataacgcgctggctcagaattgggcagaacggctgaaagagcttaacggtgctgcatttggcaacccgccgtattcccgcgctaagcaacacgaaggcgaatacattaccggcatgtctcacatcatgaatcacaccgtggccatgagagaaataggtgggcggtatgtgttcctgattaaagcggctacctctgagagctggtggccagagcatgctgatcatgttgcattcattcatgggcgagtaggttttgatttgcctctgtggttcaaacccgccgatgaaaaacaggtgcctagcggtgcattcttcgcgggtgcggttgccgtattcgataaaacgtgggcgggaccagcgataagttacattccattggaacagctgctggcaaccggcgaggcattcttagcccagatcagcagagaagctgcccgcctggtaccacaaagccagcaacaaaatattcctgaaattattccggtaccggaagccatacctcagaatattgaacataaagaggtggcagcatgacactatttcatcctgcagtaacgatgagcagccgggaaattgctgtactggtaaagagcaaacacggtgatgtaaaacggtctgctgaacgtttattttctgcgggtattttaaccgcgccgttggcgcagttcgagtttgagcataacggcaatagctattatgagtaccgtttcaataaacgtgactcacttgtgttagttgcccgcctctctcctgagttcaccgctgctgtagttgaccgctggcaggcgctggaacagaaccaaatcccccaaaccttgccagaggcattacgccttgctgccgatctggcagaagaaaaacaaaaactggtttccgaactcgccattgctgccccgaaagcagaatttgtcgatcgctatgtcaatgcgaccggctcaatggtattccgtcaggtgtgcaagctgttacaggcaaaagaaaccgacttccggttattcctgatcgaacataaaatcatgtaccgactgaccaacgggctgatcccctaccaacaccatattgaccttggtcgctttgaagtgaagaccggcaccagcaccgtcagcaatcacgcctttacccaggcacgtttcacccctaagggggttaagtggatcggcggcttgtgggctgaacatctggcggcaggagaagcggcatgagggcactgttaacgccattcatccagcgtgaattgggcgtcgtgatattcaagcccggccctgcgctgttgccttatatgtccgggcgtttgctggtggccaccgagcctgatgaattcaaaagcctgcccgccgggctactaccagtggaaaaccagcagttagccaatgatccgcgccttgctgcctttttcaggcatgaacgtgtaattagtgccgttggtgggcgaagtgcacttaaagagtgggtggagaggaaaggcgaatgccaatggcaggataagaaaggctaccacgataagaacctgaccctgttggagtatgacggcagcgccatttgtttgtgttggcactgcgatcacaaggttcgggaaaagacactaaagcaactggataccattgccgctgcaaatttgcaggcgtgggtggttgatagtgctaaccgcgccttaagtatgccgagcgagcatcagcttactttgcccgagttctgctggtggtcggtgttggccgaagtttacgacctgctgccggatgccattgctcgcgtctctctgaagatgccagccgcaaaaatagaaaccggcggtactaaagaaagtgatattacgtggtcacctgcaccggcagaaatcattgaggccaaagttaagccagtactggcgttaaaagtcgatccagagccaccagccagttttatgctgcggccaaaacgacaacgctgggaaaatcgcaagtatctacagtgggtgaaatctcagccctgttgcggttgtgggcatcaagcagacgatcctcaccacatcatcggccacgggcagggcggcatggccaccaagtcccacgacttatttactattccgctgtgtcgccagtgccacgatggattacatcgagatcagcgcgcatgggaacggcagcacggtagccagatagttctgttatttaaatttttagaccattcgattgcgatcggtgctttggcctgatggccgttatttgtggagtagtcacttatgaattcagtaaacggtgcgcggaccgcttgcagtagccaggagaaaggcgtgagagatatgcagtacaccttggaattatggggtgcatgggctgctagcgaaaatagcggggtagattggcaacccatcgctgccgggtttaaaagccttttgcctaacaccaataagtcacgtcctcagtgcagtgatgatgatgggatcatgattgatggctgcgtggcacggctgaagaagtacaaaccggaagaatatgacttagtggtgctgcactatgtctttggcatatcgctcagggcgatagccaaacggcgtaaatgttcggatgggactattaggaaagagatgcagactgcgactggatttatatcagggatactatgtgtgtttaatgcttacttttaaattttataattatgaaggatgttaaaacttatgtggaggggagcgagccagtttacacaacactctaagcagttgtgttaataggacaagaccttcaggctgaacagttgtggattgtttgcctaaatttagcgattttgaatcaactagtttatgagcataactctcaaaagaggttgttttgactcgctgctggtaaccaagagatctaaatacagagacattttgtaaacctttgacggcccattcaataactcgatgaattttatcgagattgatgcgctccttggttccgtctcttttggttatcagtagtgagttgttcataagttcctgacctaaagtactaccctaactcatttggcagctgcttccgccaaataagcctaattgggaggatgtggcgtttcctccaatttcacagcgattaatgagagagtgagtaatgttttttcttagttgctagtttcatttttttactcctaatatagaaataaaacagatggttatagtgtgttgagttttatttttgtccgctaaatacctccctacatgcaggctggtgatggatgccatatcaccaccaactattaccaaaaatgagtcgatacaaacgaagaacccaatatataaatctcaacaagtcgccagctttcttgaaaccgtgccactttggttcatctattgtgttctttgtttttttcttatcattattaggtggtcttgcatgttttctgttgagtgagccagaattttttagcggctttttcatatcctttatcctttcctgaatgggatatgaaggaagccacattaaccgtctgttgctgtgggtaagccagctttacatatatggaggtgaaatattcgaattcaaggatgaatattcataataaaatcacaaagatgggaggttgttttttgttcggctagatgtagtgtggagcattcagatgattgtttaacgctttaataaaacattagtcaaatctactggttaaaaagcgagtaaattactaacgcgtacgcaaaaatgattgtactgtgataagagttgttacgcagtcagtagcgcttatctagtcaaataaacctcgcttcggcggggttttgtgttttttgaatcccaaaaaaatgagaagccccgacaatcgagtattaattgccagggcttaattgtttgtggaatgggcggtagaggtgtgctgataacacggcctctaccattcgcctgtttggaatctcacaggcgaaccaaggcccaacgcttgtgtgcacaaagcggatctgagcctaccaaaaaacggtagaacgatctatgaaaaacactgttaatttaaacagtattaaaattgttaacgctgattccctccaatacatcaaaaccttacccgcagaaagcattgacctgatagccactgacccaccgtattaccgggttaaatcctgcaaatgggataaccagtgggaaagtgaatcggcttatttggcctggctggatgagttgctggctgagttctggcgagtgttaaagccatcgggcagtttgtacatgttttgcggatcacggttagcggcagataccgagttgttagttcgtggtcgctttaagctactgaaccatattatctgggctaaaccatccggcccgtggaaacgtcagcgtaaagagagtttacgggcgtacttccctgctactgaacgaattatcttcgccgagcactacgccgggccgtttaagcctaccagcaaaaactatgggcataaatgcactgaactgaaacgcacggtttttcgtccactaattgattactttcgatcggccagggattcattgggcgtttcggcaaaagaaatcaatgcagctaccggcaaacaaatgtccagccattggtttagcgagagtcagtggcagctgcctagtgctgaacaatacgcgctactccaacacttgtttgatcgggttgcatcggaaaagtaccagaaagggtgtttggcgaagccgcaccatgagttggttaagacatataagacgctagatcggcagtattcagaactcaaagcagaatatgaacacttacgccgcccgttcagcgtatcggttgatgttccctataccgatgtttggacatacccctcagtcccgttttacccaggcaaacatccgtgtgagaaaccggctgaactgatggagcatattatccgttccagtagccgccccggtgacgtcgtggccgatttctttctggggtcaggagcgacattaaaggccgcggttaagttgggtaggaaggggattggtgtggagctggaagaagagcggttcgagcagacaataaaggaaataacaaaattcgttgtttagcttcgattccctctatctttgctaaatttttcttatttttacggctaataaattaaatatgaaagttttcccgagtggcttcggatataaaattccttcttaattacacaagatggagtcatagattatgaaattagttagtacggttaatcatcttgcattgcaaaatcaatcttctatgaagtctgagaaccttaccccaaaggttgggatttctgatgtagcttcaagcatgaaaagtattaaaaatgtcagcttcgatagtgttcctgtaattcattatttaaataataagggggaatctagcggtaactctgaatttaaaccttcacttattgaaaaaacatatagaaaagatgtagataaagaagcaagaaataatggcttaccgtttgcagcagggcatgattttgagggggcaaaaactatttacccttatgatcacaagctagctttggaagcattccgtcagctgtaagtagtctggttatcggtattgtaagtacaggtcgcttttagcggcctttttcgttttagcccaccagccacccaatcaactccacacacacactttgaaaccgagtggctgcgctagtgggctaaattcctcaaaacaacacccgacaatgccgggaataatattccccattggggaggtggtatgagaatgcataacgagttgcacacatgggcagactggatagaactgtttaatgcctggtggcgaggtgatgttccgctcggtggtgtcctgttgtcggtggtgatggcggcattacgggtggcctataccggcggtggatggaagaaaacctttttggaggggctgacctgcggcgcattaacccttacagcggtgagtgcgctggaatacttcgatttaccgcagcaactcacactagccgttggtgggctaattggctttatcggtgttgagcaaattcgcgctttggcgctccgttttgttggcaaccgcattggcggcggtaacgatactaaacctcaggtataaaccatgaccccttatcaattcagaatggcggctaatatcagcgccgaacttgctgcgagttggattcagcctgttaccgaggcaatgacagaattcggcatcaccactccagaacagcaagccatgtttattgcgcaagtggggcatgagtcagccagtttcacgctgctggtggagtcgttcaactacagcgttaacggtttgattgctacgttcggcaagcggttatctgccggtcagacttcggcattaggccgtcagcgcggtgaaacgtcggtaccgcttaaccgtcagcaggccattgccaatctggtgtattccggccggatggggaataaaggcccggcagatggttggaaatatcgcggtcgcgggctgattcaggttaccggattagataattaccgcctgtgtggtactgcgctcaagctggatttggtcggcaatcccgatcagctgcagcttgatatgcattccgcgcgttctgctgcctggttctggcagtcccgcaattgtggccaatatgctagtgatattcagcgcgtgacgttgctgatcaacggcggttataacggtattgatgaccgcaaggcacggtttgaaatggctaagcgtgtgctgctatgacgtggctattcagtcactggcgctttgccggtgtggttgtgctggtgggcttggtgtcggtactggtgttcaacagttaccgcctctcaaatctggtcgaaaaaagagaagtggttattaagtctgtcacagcagaacgtgacgtggcgctagctagtgttcaagcaatgaaaaagcaacaacagcaagttgctgctcttgatactaaatacgttaaggaattagccgatgctaaaactgagaacgatcgccttcgcgctgacctcgctactggcactaagcggttgcagctcaacgccagctgtaagcgattgcccgaagccgcaactacccccagcagccctgatgatgccagcccccgatatgatgcagaatttgaacgcaattatctcagtctcagagagcggatcggcatcgcaaccagccagatagctggacttcaagtttatatacgtgatgtgtgtcaataatcactaaaattaattatttattcggaagttagagcaaaatccagtctactctcatgaggtttttaaataaataataaccttaaaggtgtatttaatgaaagatggactgtatcacgtaaatcccaaaagtaaccagcaggattctggtataggaattgtgactgttaaagataaaaaattaacggtgataacctgttacttagtattactcgcttcaatgaccaaggaacgtctgtttttgggaatattaaaactttccaattacaattaaaggtaaactcgacggatacttgatctcgcttagatgggcatgtgaaagatagcccacaaatgcaaattcacgccaatcgtttgtccgattttatttaaactatagcgttgaagaaaaataaagtgtagtggtaaagcttattaatggtggggagcttaactgatgtttgatgaagattttaaggataggatttcgtcgcacttaaactctaaaatagacaaagatattcaatctggccctggtttttttgctcgtaatgttatgcaggcaatgcggtatttggaagacaagcctgtagctccttcaacacgtttaatgcacatggatgagagggagttgaaaggcaaactttcaaatatttggcacattcatgtggcagaagacaatatgacaggaatgtataatttcttgaggttgaaatctgaaaaacccgagaaaaaaacaaaatgaaaaggatcttattgcaagaggagccagagaggctttgcgacaatatctgttatcaaggggtagagtgcttaaatcgcgtgaaattagagagttagctgcacagtgttctgcatgcgcagcggatacagatatggagcaatttgaaaatgaaatgcgacagtctattgatgcaatcgcgaaaaggagttttgccaaagaaaattcaatctctggagattggctactatattggaaggatgttaatggggtaaggtattatttagattctattgaacatattcttggtagtgatgttcaaaaacaaacgaatttatctaatggtcttgatgccatactttctagtatggggaaatctcgctgattgcagagatactcttggggtattgaaagaaaattatgaatataatagtcaaagattttgaaagaaatcatcatttgctttagtacatcggggttaagctttagcacatttttacatatctaagccactggcctataagccggtggcttttctatttagggatagagcatggcaactcttaaggatttatctaatcagctccagcagattaaaaagcagatcccttttgctgctgctcaggccctaaccagtgttgctcgccagattgccgccgctcagaaagtgggtatgcagcgcaatctggataatccgacccctttcaccgttaattctgttggctcgtttggtgcccgcaaagaccgattgcaggccagagtgtttgtgcgtgatattgctgccagttatctcgaaccgttcgagttcggcggtcagcacaagctcaatggtcaggcgctgcttaaccccaagaacattaagttgaataagtttgggaacttagcccgcaataaaacgcagcagctcaaggctaaagaaatgtctttgtgggggaggtgaatggcgttagtggtttctttcagcgtaagaaaggcaagaagagcaaaaaggctaagaagcgtcagaagcgctctcctaacggggtgcatagagccaggcagaagcagagagcgcctaagctactaattcagtttggtgatgctttggcagttaaaccgacgctgggatatatggaccgcgccagcgctatggcagcggcattgatgccgggtgagttgagcaaagccattcagaatgcgctagctactgccaaatgataattattcccgctcggaattttttgggtccttcctgcgacttttctaatgtacgggcattgcgcgccgcgttctgcgtctagctatgaacttttgaaatttgggtaacaggtaacaacgaggtaacagatgaatcagtcagattttgccaaacttcacgatgtcagccgcaaaacggtaacgacgtggaaggcgcgcgggtggctggttctggccggtgatgacatcgatgttgaggcttcaaacgctaacattgagcgctttcgcaaaactgttacccgaccagagaaaaaagccgcaggtaacatgcaaggtaacaaaccgggtaacaaccgcaagggtaacagactgggtaacaaatccgacggcgatccggcggagtcaccagccaaaattgtcgagaagatgattgccgagaacggcgtcgatatgaccatcgatgaagcccgcgaaatgaaagaaaactttctggcgctgcttaccaggcttgagtacgagatcaaatccgggcaggtactcccctataaagaaatgaccgaggcggtagggcaagagtattcccgtatgcgaacccggttgattgctatcgctccagaacagggtccccgcttgagggttctggcctcaaccaccgacgacgcggggtttgtgacagcactgcaagaagtggtttatgaggcaatggaggaattaagccttgataccgataacacccgaggggacagctaatttatcggcctgggataatttcaccaaagagctgtatcaacgaagaagcaatatcaaaccgcccgagccgttgtcattgagcgagtgggccaacaagtacgcggtattgtccaaagagaccagcgcgcaaactggccgctttcgttcctttgcctatcaggatggcatgatggatgcgattaccgatccccgtgttacacaggtttcggtgatgaaatcagcccgcgtcggctacaccaaaattctcgaccatgtgattggctattatctggcacatgacccctcgccaattctggtggttcagcctcgggtcgaagatgctgaggattacagtaaaaccgaaattaccccgatgctgcgcgatactccggccttaaaagcgatctcgggcgatctgaaagccaaaagcagcaatcaaactatcctgaaaaaacaatttctcaacggttcgaatctgaccctggtaggcgctaatagccctggcggtttccggcgtattacctgtcgcatcattttgttcgatgaggtggatggctaccctgtttccggtgctggggtggatggcgaccaaatagcgctgggtaccaaacgttctgaaaccttctggaaccgcaaaatagtgctgggttcgacgcccacggttaaagggatcagccgaattgaaaaagcctacgatgagagcgaccagcggaagtattacgttccttgtccgcagtgcggcgaatatcaaacgctggaatggggtggaccagatacgccttacggcatcaaatgggataaagataccgagggtaacgggctgccggataccgcctattatgtttgccgccataacggttgcgtgatccatcacaatgataaagccgggatggtgaaaggcggaaggtggctggcgacccggccatttagcggtcatgccggttttcatatctgggcgggatacagcctgttccctaatgcggcatggaaatatctggtggctgaatggttgcgggtaaaagatgacgctttaatgcgccagacctttatcaacctggtcttgggtgaaccttatgaagatcgcggcgagaaagccctgagcgaaaagaaactgattgaacgctgtgaactcttcgccgcagaagtgccggatggtgtggcggtattaaccgccggtattgatacgcaagatgaccgctttgaaattgaggtgacggggtggggcaaaaatgaagaaagctggtcagttgcttttgatgtcattgagggggatttgcaaactgacgagccttggttgcggctggacgcctatctgaaacaaatttggcggcgagctgatggcagaggttttaccattatggccgcttgcatggattccggtggtcaccatacccagaaggtgtacgagtttgccaaagagcggcttggtcggcgtatttgggcgataaaaggggaatccgcgcgtggggggaaacgctctccggtctggccgactaaaaagccttcgtcccgttcaaaatcccagttcaggccgattattttaggcgttaatgcggctaaagatgccattcgttctcgtctgcatattgatctccctgcaccgggtagcgaatcggcgggctgcatgcactttccagccgatcgggatctgcattatttcagccaattactggcggagcgttcggtagtcaaaatttcaggtgggcaacgttatcgggtctgggagcaactaccgggtcgggctaatgaggcgctggattgccgggtctacagctacgcggctttatgtggtttgctgcatttgggtttcaaactcaatcaaaccgcagacaaaattctgactcaccccgagcggttgttaccaccgccagttgaggtcgaagaaaaaaacagtctgcgcctgcccggagccattatcaaagaatcagatcctccttcacctaaacgcattgccagacggctggcataaggatttctatgttcgatgcaaacaccagcctgttggctggtgcgatgactcgcgcccaattacaggaagcattaacccgcgcgcagcaggcttatatcgagttgtcatccggcgctaaaggggtgtcgttttcttatgcacagggtgatggcactcggtcagtgacctatcaacagacagatatcagtggccttgtggggcttattcagcttttgcaggctcagttaggcatcgttaagcgtccacgcagggcgctgaggtttcgttactgatgaaaaatgaagtgaggatattggggccggatggccgcccactggcaccctcacgctcccgtgcatccatgctaaacggatcgggtggtgtgccttacgacgctgctgattcattcagcgattcaatggctaactggcaaccggcgctatggtcgccggataatgaaattaatatttatcgtgaccgggtggtttcccgcgttcgcgatatggtgcgtaacgatggctgggcgtctggcagtgttacgcgcattctggataacgctgttggggcggattttcgtccactggctaaagtggattatcgcactctggcgttgattaccggcaataaagccttcgatgccaaatgggcagatgaatatggccgcgcggtggaatcggggtggcgtacttgggcaaatgatccggggcgctatagcgatgtggagcgcaagaaaaccgtctcccagatgttgcgactggcctttcgccacaaactgacggacggcgatgcgctgtgcgtcatgcaatatcgccccgatcgtcttggtcacggacgggcgcaatatgcaaccgcgatgcaggtggttgacccagaccggttgtgtaatccgcagcagaattttgatatgccgactattcgcggtggcgtggaaatcgatgcagatggcgtgccggtggcctaccacatccgcaaggctcatatgggtgactggtggagtggtgcggcaaccatgacctgggagcgtattccccgtgaaacgccgtggggacgtccgattgttattcatgattttgacgcagagcgggcttcccaacatcggggcatcagtatttttaccccgatagtgcagcggctgaaaatgttgattaagtacgaccaggttgaactggaatcttccattctgaattccgtgtttgccgcctatatcacctcaccctatgaccctcagttagtcggtgatgcgctggataacgatgatgtcagcaagtatcaggatctgcgccgagagtttcatgatgagaagcgaatttctctgcagtccggcgcgcgtattcccattcttgcaccgggggagtccatgaccacgcttaacgcggccagacccaccagtaacttcacggcgtttgaaagcgccgctttgcgcaatgtagcggcggcactgggcatttccacccagcagttaacgcaggactggtctgatgtgaattacagttcagcccgttcagccatgctggaggcgtggaaaaccctgacccgacgacgagatgactttgccgcggggatcgcccagccggtgttgtcgtgttttatcgaagagttacatgatttaggcgaagtcccgctgcccactggtgcgccggattttctggcggcgaaagcggcgtattgccgtgcgcaatggatggggccgggtcgtggctgggtcgatccggttgccgagaagaaaggggctattctgggcatggaagccgggctatccaccctcgaaatggaggcggccgaaaacgtgggcgaagactgggaagaattgctggatcagcgccagcgtgaacgtcaggcctatatcgaacgcgatttacctatccccacctggctgcaagccgaaacctttgcacctgaccaacaacaaaaaccggaggcaccgtgaatttaccgcacttggctcagcggctgttcaataccccgctggcgctacatccgcgcaaagcggaagtggtgatggccgcgctgaccgacagattcggcctgacccgcattcagtccagtactgactggggtgacgacgatgatgaagtttttacccgcaaaggccgggataccggctatgacgtcgtggaggggattgccatcattcctattcagggcaccttggtgcagaaactggggagtttgcgcccctacagtggcatgacgggctatgacggcatccgcgcctgttttctccgggcgctggaggacaaaaccgtcaagggtatttgtctggatattgattcgcccggcggtgaagtcgcgggctgttttgatttggtcgatgaaatctatgcttctcgtgggcaaaagcctatctgggccattctgtcagagaatgcctattcggcggcttacgcgctggcgagtgccgccgaccggatcgtggtaccgcgaaccggtggtgtggggtcggtgggcgtgattgtgatgcatgtggattggtcgcagcgtatcaaagccgatggcctgcaggtcaccatcattacctacggcgatcgcaaggctgaatctaacccttacaccccattaagcgaagaggcgcagaaatccattcagtctgatgttgatgagatggggcgcttatttgtgagtaccgttgcccgcaatcgcgggatagcagaaaaaaccattcgggatacccaggccgcctgcctattggccgctgacggggtgcaactggggctggctgatgaagtggcctcaccggataccgcattccgcgatttattaaaccaagttggagaagagtaatggcgaaaattaaaggtttttctcacctgtttggccgtggtgccaaggcatctgaagaaaatgaagaggataaggaaaagtcggagaaggctaaaggccgccgcgctgaagacgatgaggatcaggacgataacgaagacgaggaaaaaaacggcaaaaaagccaaggggcgttgcgctgaaagtgatgatgacgatcaggatgaaaaagaccctgatgcagaagacgacagcgatgacgccgatgcggatgagggggaagacgatgacggcgatgatgaagacgaagaccgcaatgttaaaaaggggcgtcgggctgagcgtaagcgctgtgcacggatttttggcagcaaacatgcagcgggtcgcgtggatttagccgcttcattggcgcttcattccggcatgagttcatctgcggtaattcgcgttcttgcctcgaccgcagcggtggcacccgcagcctcaacccctcgcaagcgttctctggatgagcggatgcaggcgttggggaatgtgcaagtgggtcaggatgctgccgatgccccaagcggctcggctcaggcgctgatcagtaaaatgacgggtttgtataaccaaacggtaggtaaaaaatcatgaatgagataggacagaatagttttactcccggcgtcactcaggcggtttttgttccggatcaactggtcagtgggcctctgcaacttgtcactgataccgtcagcctttctgcgggtgttctgctacgcggtacggttttggggcaaatcacgacgactaaagcctatatccaatcggttaaaacggcgacggatggcagtcaagtaccttgcgctattttggttgataacgccgatgccacgactggtgcagttcaggctggggtttatctgatgggcgagtttaatcaacatcgggttatttttgatgacagctggacgctggccgatcttgctgtggctcttcgtccgtattctattttcctccgtgacagcctgaccgcctctaatacctaactctgtttgtctgtattgactgatgccatttctttggtagggcattgcacgtcttcattccgtccggcagcgcaggctgtcgggctattttatagagagatttcatgaatatttttgataccaatgtgctggtgcaaactgtccccaacctgaaaacctcacaaaactttttactggatcgatttttccccaatgttgtgacctctgacacagagtttgtgtctatcgatgtggatgtgggccagcgtcgaatggcgccatttgtttcgccgctggtgcagggcaagctggtagaaagtcgccgtctgcaaaccaataccttcaaaccgccttatatcaaagataagcgcgcacctgatctgcgtaagccaatccgtcgccagattggtgagcggattggtggcgagtacaccgccgccgagcgtgaaatgctaaatctgcaattcgaaatggccgatcagatcgatatggtcaaccgccgactggagtggatggccgccaatgcgctggcgtccggtaccatcaccgtcaccggtgaaggttttgacaccacggtgattgattttggtcgttctgccgcgttaaccgtcgccctcagtggtagtgacaaatggccgatggtggttgcggcaggggcaaccaacgacaagccttcgcaagatattgagttgtggcagactcaggtactgaaagactctggtgcagtcgtgaccgacctggtgtttaccacctcgtcatggcgcgcgttccgactggataccaccatcaaagacaacgccatcgtcttcccggcattaagcccgtttggcaatcagattgatgccggtgcgcgcgtgggcaaaggcgcggtgtataaaggccgttggggtcagtttgatttgtggctctataacgattggtacattgacccggttgatggggttgagaaaccgatgctgccggatggcgtggtcattatgtccggtgccgatttgatgggaacgcgcagctttgccgctattctcgatccggccttcaactatggtcccatggcctatgcgccgaaaagctggcttcaggaagatccggctcaacgtttcttgctgatgcaatcttccccgctggtgattccaagccgggtcaatgccactctctgcgcaaaggtggtgtgagatggcgaagcaaaaagatatcccggatgagtcaggggtagagatagagaaaactatccctgtggaacagctagaagggactgacactcagttagaaacacctgatggagaagatcaggaattccccggtgacacgaactctctcagcacgacggttgtggtgcttaaggggcgttcagtgaagcataacgacaagctctatctcgaaagcaataccttggttctcgatgatcttgacgatgtagtcactctgattgatgcaggttttgtcattacgttggataacttgagaaagcaagccgctgcccgcgaagcagccggtgcgccgatgattcaggttaacaatggcgttatcgtcactcaggaaggctagcgtatgggcatccactgggatcagcatcttctcgcgccactgcattcggtatttggcgatccggttgaataccggcccacacgcggtactccttacaccgtcagcggtatttttgaccgggcgtatacgcaagatattgaaccgctcgatgatggctgcaccatcaataccactaagccggttttaggcgtaagagacagtgagtttcgttcaccgcctaaacagggtgaccgggtatttattgctgtggccggtggcgtgaccatcaatacgctgttcaccgtgtcggacgttcagcccgatagtcacggcggcagtaaactgattcttaatcaggtcaaaaaaacatgaataccgcccaggtaagagaactggtggtggcggctctacaggggaataccgacgcagatcaccgtgtttattctccgcgtgactggccaaccaccgaagagatgtatccggtactgctgatccaaaccttgattgaggaaaaacagtcactgggtcgtaacgccccgcagttcaataccatcactaccgttcgtatcactggtcgcctgcaagcgtttgacagtgaactcgccgatgatggcgcggtaaaagcggagctggccttagagcggttgcgcgatcaggtcgagcgggcggtgattaatagctatgaactgacgcggaaaattcagcaattcgcgcgagtacgctccacgattgatattgattcctcgggcgaagggcatatggctcaactgctgatggaattggatattgaatattaccaaggcccggaagatttctatcctatcgatgccgagccgctggcgggtattgacgtcactattgccatgcccgatggcacaccagaaccgctggtagctatcaacctttaggagtcaattccatgattgtacaacccgtaaccggtcgatcagtacgcgatccggtgaagggcacctttttgcccgaaaccggtgcagaggttcccgacaattcattttggcgccgccggctgaatgacggtgacgtggtgcgcgttccagagccgaaagtgaaacccgcgcctgaagccacccaagtggagaaaaaaccataatgacccttccttttagccatattccgaacaacctgcggacgccgcttttcttcgccgagtttgataattctcaggcaaactcggcaaccaccatgcagcgcaccttaattatcgggcaaatgctggcaacggccacacttccacccaatgtaccggtactggtttcttctgtggccaccgtggccgggttatgcggtgcgggttcgatgttgcaggggcaaatggccgcgtatctggccaatgacaccgccggtgagatttatatcttacccttgagtgatacagaggcgatggcggcagcaaccggaaaaatcacggtcaccaccccggcatcggccatgggggtgatctcgctgtatatcgccggtattcgggtgcagattgcggtggtggccactgatgacgttgccaccattgctaaggcgctgaccgcagcaattaatgcggccacggctttacccgtgatagcgacggcggaggcgggggtgattaccttaaccgccaaaaataaaggtgctcacggcaacacgattgatgtgcgcctgaactatctgggcagtgccggtggggaaaatacgccggacagtctggcgttgacgatcaccccgatgtcgggcggtgccggtgcgccggagctggatgatgccctggctaatttgcaggatcgcacctttgatttcatcatcaatccgtacaccgatacggcgtctctgaataaactcaaagactttttatcggacagtaccggtcgttggagttacgccgaacagttgtatggtcacagctttgccgcccaatcgggcacttacggccaactgacggcagctggggaattacgtaacgatcagcatgcctccctattgggggtgaatggctcgccaacaccaagttacatctggtcagcggcttatgtcggcgcgattgcacaaagtttgcgtaacgatccggggcgtccgttgcaaacgctgagtatcgccggtgtgctggctccgccactggccagccgctttactctgaccgagcgtaataacctgctgcatagcggcatatccacggtcacggtggccgatgacggtacggtgcaagtggagaatatcattaccacctaccagaaaaacggatttggcgtagaggatgacagctatttgcagattgaaacgctgtttttgctgatgtttgttactcgctatatgcgaactcaagtgacctcgaaatttgcccgcatgaaactcgctgctgacggtacccgtttcgcccccggatcagccattatcacgcccaacgtgatccgcgccgagttgattgcccagtatcaggcgctggaatttaacggctatgtgcaggatgcgaaaggttttgccaaagggttgattgtcgaaaagagcgccagcaaccccaatcgggtcgatgtgctgtggaccggcgtcctgattaatcagttacgtatttttgctgttcttaaccaattccgcctgcaggcgtcagcataagggatcgattttatgggtgatacaagaaaccgtctggccggtaccgcctttgtcacggtagacggactgaccatcatggtggcggggcagtttaaatacagcccgtcacgggtcaagcgtgagacgttaaccggcatggatggggtacacggttataaagaaaccttcagcgccccgtttattgcctgccagatccgcgacagcgggggcacctcaatcagtgattttaacgagcagaccaacgtcagcattatctgcgaactggcgaacggcaagaccattatcggcagcggtatgtggtcggtgaacacgcaggaagtggatagtacggaagcgacagcggatattcgctgggaaggcggctcggtcacggagaactaagatgtcggaattagaacgcagtaaaacaattacgctggttaagcctattagctatgaagccaacaagactacttatgaaaccatcgaactcggtgagccggtactgattcaggttcagcagttttatgacgagcaggccaagtctggcgcactcagtgcgatgggattattaatttctctggtgtccagtgtgccgcgtgaggccattaaaaagatggctttcaccgactacaaagcctgcgaggtctacatgatgggttttttaacctactccccgccagagaacgttggttagaaacgctggccgatgtgacctattactacggttgggggccagccgatgcgtggtccctgacctacaacaggttgttatggtggtgtgagcaggctcagcggatcaacaaaataagggcagataaacaaaatgggtaacgcttttgattttgaactggtggccaacgatcaggtaacggcgactattcaccgtattgacgaggcggtaaagaaactggttccccagttggataagacccgcgatggcttaaaactgggagggcaagagtccgtcgaaggtctggatagtatcaacgataaactgcaaggaatgggacagttcgcgcgtgaaggcgtccagtttattggtgatctggtaccgccattaaaaatggtcggggaattaggtggtaaggcgttaaagtttggtggtatagccgcggccggtgggtatgttatccacggtttagccagagggctgggcgaggcggccggtaatgcatatcaactggatacggcggcaaaaaatgcgggtatgtcggttgataattttagccggatcagcggtgcgatgcagatattggggatcgatagtgattcagcccggcaatctgtagagggattatataagacgtttaatgacccattatgggcgcgtaatgatacgacacaggcattgctggctcagaacggggttaaaattgaacgactcaaagacggcacggcagatgtgtacaaaacgctggaaaacgtggcaaagatattccctaagcttgccccgcagacgcagaagacattggctgatgcattaggtctagacgaaaaccttctttcgttaatgcgcgaaggctctcaatacaaagagctgttggcaaaggcggataaattcggtttaacggttgaccctcagaccaatgcacaactcaccgagctggatcgccagttatctgaggtgagcgcagcttgggatgggttaaagcagcgagcctctaataaattctatgctgcgatattatccgatggttcagtgaaagacgggattgagggggcgaccgatgtggtatccaatggtgtagacagtatatctctttcccatttactggggtttaatcggggcgatgaggctaaccagttacgccgtggctataacgaccctgaattttataaatcattgagtgaatgggataaagtcgggttggactacggcatgatgaccgatggttatcgtaaaaagtatgagcggcattatggccctaaagatgagcaagaaaaacaaaagctagccgcccccgcaaatacgtcttacatgcttcctagtgaagatcagcagcaggcgaggttaaaacagttagagtcgcagtacaatcttcccacgactctgcttgatcgtgtctacctgaatgaatctaaccggggtaaaaacctactgtcaccgaaaggcgctcaggggccgttccagtttatgcctccaacgggcagggattacggattaaataccacagaagatcgtatggacttcaataaatcaagcgaagccgcagccaagtatctttctgatttgcttaaaatgttcgatggtgatgtcaataaggctgttgcgtcttataactggggaccgaataacgtcaaaaagcagggcttagaaaaagcacctgccgaaacgcgtcattatcttcggaagattatgccgggactacccccttatcaattgcccatcaatgatcccaatacgactggcgcacctgataaccttaattctcgcccagatccgggtaccggaattatagccaggaacccaccttctattttatcgccatcatcaaaggccagtagcagtagcctggatatcgctaatgctattgcgcaggcgatggagagcaataaaacagagatagagctgaccttgattgatagcaagaccggtggccgccaggtgatatcgggaaagggcggggccaaaatatcgacatcaatggactattgatgcaatgaaaaaatacaacctgcttcggcaggttttctgctttctgggggcaagcatgtccataattggaaatgcattatcgagtttattgggtaccagtggtgatagctggacgtggcaggatcacctgcatccggcctcatttcgcggggttccttttgcggtggtcacgggcgagggcgtttttgggcgtcggcaggcgatgcatgaatacccctaccgggacaccgcctggtcggaagatatggggcgggctacccgccgtatgaccatccgggggtttctggtgcaaagcagccagctttataacgcgccggatgtgatgacccagcgtgactccctgattgccgcctgtgaagaagcaggacccgccacgctggtgcatcctactttgggcgaaatgaccgtcagcataacggaaagcggtctcaggattaacgaaggggctgaatgtgggcgggttttcgaattcacgttaaccatcattgaaacggggttgcgcgtttttgccatcaccagttcggctgatgcggtttcctctgtcagcacatcatggttcgggctggccagcaaaaccgctactggatttattgccacggtaaaaggggaaattcgtgcggttaatcaaacgataaaaaccctgaaaaacacggcccaattttgggtgaagatggtcaatagcacggtcaatgaagcgaccaatctggggaacacgctgcgttcaacctttggcagtacccgttatggccgctttaatttcggtagcgttgggggtagtgccaatggtgcaaccggtaatcgtgttcagcaaccggatgctgccgatttctccgggctggtctcccagcgtctggcgctgacggtaacgggccgagccactatcacacaagccagcgctgcattcatcaacgcggcctcggttgaggactatgccattgccgctgagcgattggtcagcgccattatgacggatgccgtgagtgccctggatttgatccggataatggaaactctgtcatcagagaataatgacgatgtattttatgccaacagcagtgatacccgtatagcccaggcagccaatcacatgatggtcgtactctgtgccgggtcaatggtttatgccgcgtcgcagtttcagcctgaaagttatgatgaggccagtgcgctactggctcgcgtgtgtgatgtggttgatcatgccgcgctggccgctgccgataggggtcatgatgatgaataccgctcactgaacgatatgcgccagtccatcgtgaccttgctacaacaggccggggccaacttatcccgtctggaaatacagcgttttaatcgctccctgcctgcattgaatattgccaaccgactgtatcaggatgcgtcccgtagcgacggtctagtcagtatggctaatcccgtccatccggcctttatgcccacccgatttaaggcgttaagctcatgaatgacgaactgacattgagaatcggcggcaagttaatttcaggctgggatcaggtgcgggtgacccgcagcatcgagcggctgcccagtgatttcgatttgtcgttgatggatctttatcccggaagtgataaccagcaatgggttaatccgggcgatccctgtgtggtgatgctgggtcaggatgtggtggtgaccggctatatcgaccgctgggcaccgatgatcagcaaaacgcgtcatgaagtccgagccaccggtcgcagcaaatgccaggatttggtcgattgctccgctgaatggcccaataacgtgatcagtcaatccacggcattgcagatagcccagaaactggccgcgccctatggggtatcggtagcgaccgatgtcaccgatttggacattgtgccgcaatttaccctgaactggggtgaatcgtctcaggaagtcatcgaccgcattacccgctgggcggcgttgctgtactacgacctgccagacggcagtttatacctgacccgcgtcggtacccgtaaagccgccagcggcgtggcgcaggggaccaatatcgaaaaagccgcctttaactccggtatagatgagcgcttctctgactatatcggcgtttccatgtcagtcagccagttgcaggaacaggttcaggatgcgggatacggttcggtgaccctggcaagaagccgtgacccagaggcagcccggatgcgttatcgcaatcgcattattattgtcgaaagtaccatgaaggcggctcaactggcacagcggtgcattgattgggaaatgaaccgccgttacggacgttcaaaagaactgttggttaccgtggatagctggcgggacaaggacggcaaactgtgggaacccaacaccctgatcccgattgatgtaccagtttttggtttaaaggatgaactgtggttattggccgaagtgacctatctaaaagacgattacggtaccacggcgcagatggtcttgatgccgccagccgcgttcaccgttcagccttaccagttctatagcaacctgatggagatagctcactgatgaatgattcagggcaactttcccgattataccggcaagtcaagatgatgcttggggtggggcgggtgacggcttccagcgatgccggcagcgcccaaaccgtgcaataccagaccccgctggaagtccgtggcaacacgcctcgcatggcggagttcggtttttcttctgcacttcccgttggttctgatgtggtcattggttttcttggcggtgaccgttcgagcgctgtgatcattgcctctaaccatcaagcctatcgccataccggcttagttgcgggggaaacggtgatttattctcagtgggggcagtttatcaagctgacagaggcggggattattattgaggctaacaaccagccggtaacggtcaataacgctaccgaagtcaccattaatgcgaccgacagcgtgctgatgaaaacgccaatattgaaagtcaccggcgatattattgatcactgcgaaagcaattcggccaccctgaaaacgctgcgtgaggcctataacagccataagcatccggttaaaaatgtgcaagggggcagtgccaccatcaccagtgagccgcccggatcgggggtgaaatgacagatattaccaccctctggaatgttaacgaatccatcggcgactggtcgcaatccgcggggcttgggctggctgacggcgatgacctgaaaaccgccattcttatcagcctgtttactgaccggcaggcccgcgctgatgatgtgctggacgatgccgatcggcgcggttggtggggagataccgataccgagcaggccatcggctcccgcctgtggttgttacgccgccagaaactgaccacccaggttgccatcaaggcagaggattacgcccgtgaagcgctggcgtggctgatttcggatcaggttgtcagcagcatcaacgtcgccgcccaaatcatctatcccaaccgcttaaatctgatcatccgttaccagcagccgggtaaaacccagactgcggttaaattctcatgggtatgggagcaataattcatgccattcaatcgaccgacattaacggaattacgccagcgcaataagtcctatatccagtctgagttaaaaaccaccggcagtttactgcgcttctctaacctgggcgtgatcagtgatgctgatgccggtctagctcatttgcattacggttatcttgattatatcgccctgcaggccacgccatttcatgccactgacgaatacctggctggctgggccgcgctgaaagatgtgtttcaaaagccagccaatcccgcaacttgcccttccgtcttattcaccggaacggcaggccggactattgctgccggtgcggtgctgaatcgggctgatggttatcaatacatcctcgatagtgatgtaacgatagccccggcaggaacgggtaccggcagtgtaacggctattttgtccagcccattggatgatgttaccggtggcggggtggcaggcaatgcggatgcagggacgctgctgacactcgacgttgccgtagagggcatcccttctgcggcgatagcgacggtgaaaatagcgggtggggcagacattgagagtgaagatgcttttcgttcccgcatgttgctggcctaccagaatacccctcagggcggtaatgataacgactaccgattatgggcgctggcggtgccaggcgtcacccgatgctgggtggcgcggcgcttaatgggcgcggggagcgtgggcatttattttatgtgcgacgggaatgataacgggggtttcccgcaaggctccgatggcatatcgcaacgggagcaatggggagccataaaagcgaccggcgaccagctgcgcgtggctgatgctatctatcccctgcaaccgattattgcactggtttacgcctgcgcaccgacaaaaaagccgattgattttgttattgcggggatagcgggggcgggcagtgccacggttgaggctatcaacgcggccatcgatgaggtctttttcgaggaaggagagcctggcgggaaaatttactggtcatccttgctgctggcaattggcgatgtgccgggtaccagtgggtttgtccttacgtctccctcgaccaatacccaactggcgatcggcgaactgccggtgagggggagggtaacctacacatgagccgattctccgttaatgaatatacgcaggctttgcaggctctcatgcccacggggctggcgtggccacggcgaccggatggagcacaaacggcggtgctcagagcgttggctgccgcctatcagcgcagtgatgaagaggcgcaggatctgttaattgcagcattccctgccactgctacagcgttactgccggaatgggaatccacgctgggtctgcccgatttatgtgctattggtgagattgacagccttatccaacgccagcgcgccgtggtgtctaaattgttcggttcaggtggccaatcggcggcttattttatccgggtagctcaggcgctgggttataccattgaaatcacccagtaccggcaggcctgtgcgggcatgtcagtgtgcggcgatgctattaacggcgaggactggccgtttacctggctgattactgccccggaaaccacggttaatacagcccaatgcggcctgacttacagcggcgatccgctgcgaacgtggggtaataaacagctggagtgcaggcttaatgcccttaacccttctcacgccattctcaggtttggctatataaactaactcattgaataaaaataacttagcgctttcattagcgaggattttctatgcaaaaaattggcgatataccgaatacccgagcagacagtcacggtgagtttacggacggtaatgtggcgggcggagtgtctcccacgatactgccggccgaatggtttaataccatacaacgagagttaatcaatgtactggcggctggcggggtgacgcctgacaccacaaagtttaatcagctcgctacagccatttcaaaaataatcactgatggtggctttttaaaaacagccaacaacctgtccgagataaaagcagcggggcaagcagctgtcgcacaaactctcgcaaaccttggtttaaaagaagcggctaagcgagatgtcggcactgggattaatcagataccggatatgtggagttttaccagctcaatgacctcaacaggctggatgaagcgacccgatggtttaattgaacaatggggagaatcatccttttccagatcaaatgaccagtttttttatgctgacgcttttttcccaatagcgttccccaataaagttttaaatatgagtgtgacactccacggcatcaccgatatttcgataataggaaaaacgctcgctgcggatatgttagcaagaacatgggcagcgatcccactgagcaagaaaagcggggaaaacatccctacagcgcaaagagttatgtggcgcgttattggttattaagtgaggtttaaatgaattatttctacagcccagcgaataatgccgcttatccagaatcgttaaaaacggaatatcaggctgcgcaaagttggccggaggatgccgttaaaataacggacgagacttatcagacgttttttgcctgtgcttcgccagccggtaaaaccagaatagccggaaagcaaggccagccagtttgggaggatattcccgtttatgtccctaccgatgatgaattggccgcccgtgctcgccgctatcgcgatgctttcattcaagccaccgatcccatgatggtcagtgattattctattgacgacgtaccgctgacggaagagcagcgcagcgagctaatcgccactcgtttagcgttcaaacagtggccgacgctggcgagctggccgctgattgagttgccagtgattgccgggctggataaatcccgctggctactgacggaagcggtgaataatggctacgtggtgccggtgtggccgccagaatttcgttaaatctttataggccgcatcgttcgtggcctataaaaaatcactcaggctttagtggccactcgatatttggcgcagttgaaacgtcaacacgcatcagcaaaactcgatattttctccactctgtgaggtcagccttttctttttctgtcgcatctcccatatcaacagcatcctgccgccaggcaatttcagaatcagccgcctcccttaatgccttttttttctggacagcgcgatatatcaattcttcaggtgaaggcggtggtatatcaacccatactggccgtccatttaatgaccctatggtcttcctatctggtggagtagttttccagtattcattagattcctcatcagaaagtaaaacagcatcacttggccaggttttcttgttatatgtaccatcatctttccatgctgcaggtatgaatccatttaaattagcgctgtaatataccattgcatttccctcaatatccgatagcaaaaacaagtggattagctgttccaggaactgacccagaaccaaatacttgtgagaatagggtaatagaatttaagttggttgatgtcacttgaaacatttggtcgcatgaccccgtaccattccccagagtggacacgctggagaacacgcaagcagttgggaatgctatagggaacgagagtggacccatggtgctctcaccagtagaggatgggccagcaaaccattgaatgatcaatccaccaggaacatcaggtatgcgaatataatctctggtggttactgttttcggctgttgtgctgagatttgtttccattctgaccatgggcccgccccattccactcagcggtcagaccacggacaaacttcagtcctgagtacgtcgtatactcttgctggcatccataagctgattgcgtgacaagcagtgttccacttgtatttgccgggtagtgcctaccaggagttgcttgagaatcgacggattgataccaaacacccacgcttgacgtaatattaccaaaaccatttaaatctgaagtacccaaagaccctttaatagggaatccactaagatttgacagcgccaaagatggatttgcaatatccgagagattactgattttggcaagaccaccaatatttgtcagggacaaagatggatttgtaacatcagagagattactgattttagcaagagaaccaatgtcattggaggttggtttgttattgggcccgtaaaactcaacccatgatgcccatggccctgatccagtccatgcactagataatccacgaacaaatttacgaccagagtaggctgtatactcttgctggcatccataagctgattgcgtgacaagcagtgttccagatgattgaatcggataattcgccgccgaggttgccaatatgtcggtgggttggtaccacacacccgcagaggttgccctatcacccagcgcatttaaattaattgtcccaagatctcctttagatgcaaacccaccaatatttgatagggactttgaggcattagtaacatcagaaaggttggcgcttttcttcagggcatcagcagcggcggcaatgacttcgcccaaaccaaggtttgcgagatcaccggcggcaacactttctttagtcaccagccttgctgtgacacactccgattattttttcggggaaatcaacatgctgatcggctatatccgggtatcaacaaatgaccaaaacaccgaattgcaacgtaatgccttagttagtgcaaaatgcgacctgatttttgaggataaaatcagcggaaaatccaccgaccgaccgggattgaaaaaagccatgcgccatctatctaccggtgacagtctggttgtctggaagctggatcgccttgggcgcagtgtcaggcaccttattacactggtggaagatttaaagagtcggggtattcactttcgtagccttacggacagtattgatacaggaacggcgatggggcgcttcttttttcatgttatgagtgcgctggcggaaatggaaagagagttaattgtcgagcgtacctgtgccgggctggctgctgcgagagcggaagggcggataggagggcggcgtcgtattatgaccgatgaggttattgcgcgtgctagacgaatgtttgctcaaggggcaacgttgcatcaggtggcgttggttctggaagtgtcacctaagacaatttataagtatattcctgcagcggagcagggatgatgatttttctgattgatcactgttcacacccaactcaccgccatttgcccagaatttacccgcgaggctctggtcatagaaattgaccttaatatcccggtactaagggtcgtacgtgtgctgaacaggatcgtggcaaaccgcggatatccactgaaaatgcggatggataacggcccggatctgatatcactgatgctggcgcagtgtgctgaagaccatggcgtgatgctggaatttattaagccgacgcagaatgcgtttatcgaaaggtttaaccggacgtaccggacagacactggatttttatctgttcaaaacactgaatgaggcacgggagatcacagtgcgctggctgaatgaatacaacaacgagctgcctcatgaatccctgaataaccagacaccggaagaatacctgttgatggctgaaaaactggaagtctcaaaaagtgtgcgaaactaaaatgggtgtgctttcacaagtaccgacagagtccagttaattctctcttacaacattcgctacaaataaacgggaagcatatctggatttacatggagatacggtgagagctttaatacttgtaaccctgccatataaaaagttaatattcagacaggatattaactataaaattagggatatacatggctaactcaatttatttaaccttgagtggtaataaacaagggctgatttctgctggttgttcaagcgtcgattcgataggtaataagggacaggaaagccatctagataaaatattcatatacagtctttcgcattcaatgacaagggaacaaaatgcaagccaccatcctatcacaataaaaaacctattgataaatcgtcaccgttacttgcggttgccatctcagataatgaattattaactgcgacttttgattgttatcgtactagccaatcgggggctcaagaactgtactacagtatttctattactgatgcaaccatctcagatctagctgtatttcatccacatagtgtgactcatacaggttcagaacctcaggaaacaatttctttacgttataaaagcataacctggaaccatcatattgcagggacaagtggctatagtatttgggatgaacgagtttactaaatagcggactgggaaatttatgatttgtagtggataactttcccagtaactaattaaacgccgatttttcttcttgcaataatatatggtgcagcacttaaataaccaaaaactagagatgtgtactgaaggaattcgttgttacttatatctattttaaaaataggaataacatcgaaattcgaaacgtaaaagtggaataatggcgatattgacgccacagcaatagctgcaaattgactgtaattatcgttggaattggcaagttttttaattattggatataaaataaacaatactgctgttgataaggtaatatataaaaaatccatttatttaacccttgtatgatagatattggccgtatgcagtattgtaatcgcccactatctctaaaaaaatatcgccagcagtcattagtcttatccctttcttagttaaaccagtgataaggtctgcatctatatatctaaataatctctgtaggtctggttcaagtctatatccgaataggctatttaatgaaactgatatatctacagtggagtaaagtacgtctgcaccagattcatctatattgagaagttgttttgctaggccacgatacacaaatctcaccgggccgacataatcctcacgataaagaagataataaccattctcaatagtgttattaaaaccatgagctagcatcaacccgccagctggaccagtttcaattagtccaaggccagccacagtttgtaaaccgccagatacaaaacctatagcagcgattactattttcttattttcttttattttgttcttattgaattcttctataacctctctctttaaaattatagcttgttttattctgttgcttgttaatattctatcttgttcttttaatgacgcaatttcattatccaatgcagaaacagcttcaggtaatgaaaactcaccagtattagtcttcgctataatatcagaggaatatgctattacctcggagataaatttatctttggctaaactccattttatatacttattggcaacgttgttcattgtctgaagaagctcattctgcttatttgcaatgatgttatttagccggttagattctctttgcgcgctatcaccatatccagtagcccacgggtggcgttcttcaaactcctcatatgcatccatatcgtctgatccttgacttatttttagataaattcaattacattatatagttacattagcttaattgtaagccctccaaaaataattgaaattttcatatgtgaaagcggcattttgcatgcctgaataactgttcctaataccgctacacttttgcctgaccatgtttcccaccagggaatgggcttaccattttcataaagtggcgcactttgttcagtaattgccacatcgaacgacaactgtgatttctggttatcgtgtcatgtaatgcttgccataatcgctctatgtggttgacccgcggcgagtagactgtttgataaataacaataaattttggcttcttcaaccatctcagcgtttcacggcttttatggataatgtagttatctacgatcagtgtgatagtttttgcccgcctataggtacttttaagatactttaacaggctgataaataaacccgattttttactgcaacaaccgatgtagctgacttttcccgtgccacgcaccggtcagataatatttttcattttgccccggcgtgacaacgcgtttttgctggcccgccgttgccagtcggcaccgatttttggttgagatggatattcacctcatcctcgtaaaatacgggattttcggcgtacatcctgcaagcgcttctgcgatggcggccattttctcttctttatgcgggtcgcgaatacgcagcgtgggtgccgctctccgccagaccagcccggcagagggaagccagcggcgtaccgttgaagcatgtagatgacagcctgttatctcattgatttttagtgctaacagttcagtactccagcgaaatcgctgataaccaaaatctcccggcgagtgtttaatcaactgacgcaacaatgcgcaaatatgctcaaacggccagcgtcgtccgcgccctgagggcaatgatttcagacctcaaataccataaaccgtgaaccagttaatccagcgccccaatgatgaacgcacgcagcaaagcgtttttgcaacgtcgctgactttgtcaccacgatgaagcatcaacatagcggtcagtctgcgggcatgatctttgtcgcgtgtttgatgaatagttttctgtatcaggcgtctttcgtcgcggggtatcgatgctatgatcggtataactcagtccggttggtggtttgggatattcagcgattgatcagatcgcttaaatcggactgaattcctttcgagtgatctactatttggaacagctatttagactggcgctgttttcagggaggagatcacatcagccggtgggtgaaatcgagggatcagaataggcagaatgtatataacgaatccgggctgaattgcccggactaaaaattcaaagttctgaaaccagccactgatcggcttcatcaaacatttcttcaagcaggcggttaaggatggctttatcacctttgttggcattggtattgataccgttcgcctgcattggcttaaccttaacttctgccttagggaatacacgatgtattcgcttggttagttcagccaggatcagaccattagcacccggtatctcttccacatttcgcttatggtaaaccagttcaactatcatgtttccacttcgccctgtgactgtttgcatatacagtggggagttctatcgcggttgaaaagtccttctgcaaaactatctttcttcacttaataatcaatcggttataagcgccacttttaattgtgttgagcgaataaaaaaagccgataaccatctatgaatcatgtggttaccgacttttggtatgtctactgctgcgtcatatgggctggactgaagccgctgatttaatcattaaaggcactgaaggcgcgattcaggccaagacagtgacttatgacttcgaacgtttgatggaaggcgctaagctgctgaaatgctcagagtttggcaacgctatcattaaacacatgtgatattgacagtcagctaaatatgaacgggagcttgatgctcccgttgtttattgtaaaggttgcaagttttatcaaaacattatcaaaatccccataaaacaacgttcatcagactgcaatagtgatcccgtctttgcctctgtcatcatggtaacgatcggtctgtttctgtgatttgtggcccacagcaactgggtattaatcccttgcgcgctgtacagccgttcaaaaagagagcgcggcttgtgaaatgttgcaggtgttcctgatccccaactgatattggctttatcccttgctttgctaaaattgtcgtcaaagtattaccagtgacctgagcaccacgtcctgccatggatgtcgctcggaagtaatgcaccaagtactggtttattgcgtaatccctgcagcgagccaccatgtcacgcaaggatatattcagcgcctcatatcgtattgaaaggggaatggccaacttagcgtcagttttctcttggataatatctaggtggtcatcctagatatcgctaaattattatagtaataaaatcaggcgatacataaccaaaaatttctttcatcaataattgattaaccaataagttttatatcaccgaaatacactaccagaatcatataaaataattaacgggaaggcacgggaatggatatagtctaaaacatcacttaaatggccctatcaagaataggatcatgaattaataaaaaaacgatctactcaccaacagattcactattggtttgttatcatgaccctcaagttttattaaaattcatccttgtattttgttttaactacatagctgcaaggataaccactatttcatcaatataaaataatggagccagcatgaataataagttattattatttttcattataacatcaatatattctagcaatgtgaaacctcaagatattatatatgaggcggatatagaagcatcaacacaacctcaaaaaaaaacgtcaacacccatttgtttttatactaatgataatttccaaggtgaacatttctgcctaaatacatctgaaatgatagatctttacaatactgataataaacatctgaatgataagatatcttcaataaaaatacctaaaggaatgcaagccgaaatttataaaaatgataattttaatgccccttactataatgttacggaatctattgatttagcgcgactagaaaaaatcggtatggcaggtcaaattagcgcgatgaaggtatttgaagcgcaggctatttgcacgaaaaactgcgttattatagaagaaagtaaaatagaattaaaaaaaataataaaagaatattatccaaaaacagaagatgtcaataaaattttattattaaatctcgaagttaataaaaaaagcagttttggtatacagagtgttaaccaaccaaaaattataatcgtgggtagagatttgtttttttatggtgaaggaagtaagaatcctattaacatgaggttaagcgatgatacagataacctatcctttcttttaaaatttaatgatcatggtttacaatttcaatatcttgaagctaaaggaacgaaacaactcaatatcccattttggttcaatacccaattatcacctgatgacttagcaaacttatacatcagcaatggcataccggaagatggccaagatcctgctcttcagagcatcaacccgttaatactgaatagagcgatcatcgccatcaacaagcccccccaccgtgataaacgaggcgctttaggtattattggctgtttaggtaaccctctgctggcaatttataattatgtggttcaagggcgctgcaaccagctcgatagactggtgggaatcaacgagttttctcactcagatggggaagggaaaacatgggttttgaccgattcagtcacgccattacttgcgccagagcagccccccaacttaccagcagataatccccgtcaatcaatgttacaattagccagtcttaatatgcagttacatcatcaggcacttactctgccagcggtggcaaaagcctgtaaaacttccattgaagagattctatctgcccgttatccaaggcagacaggcattcgctgtggctccacattatcgaatctgctggcagattttacattgctttttggtgaaaatattattgattggaccaccgcaaatttggtccatgttatacagcaaattaatgaatatgggactacgggctatgccggatctgaccaggagacggaaaatcggttagttgaaggtgttcaacgggcaatttctactctgggaatcgaaccattaatagcaatgctgcaggaggctttcgattatgcacaattaaattacgcacgttattttatgcacagtgaaggtatcaacagtgaaaatataaataatgaaagtcgagagactacagtctcacctctagccgcacaaagcctaccactaggcgattatattttacctttagagagttatattcaccctcaagaactcccgacaccattaattagagacaataatcagtgggttcagcctgaaggtctatattttgaaattaccgtgattcccggaggagatcagcatgtcgagacgaatttaaccgaagaagtggccgaggttattaacgattggtttaaattctataatcagatgaaatatgaatcagatgaaacaagatcacctttaactgatagagatagaaccatttatgccgccaaaattaccagccatatgttagctgatcttttgcatgacaactctgccgattatcaatttgtagtggttaaactaaagggaaaaataatcagtgtattagcatcaagaaatgatgagaatggcgaggatagctacattagtgtttctataactcatccacaatatgtattaaaaccgcatgaagagggtagcgttcgaggggcaggaacggcggcggtaagagaattagcgcgctatctgaaagaaaaaggtaaaaagacacttaaatctagtgtcatttctcaaccctctgctattgtcaaaagcaagctgggattccactatcagaattctttatgataattatttattaaaatagactaaacgccaccattcattatccaatcaggtggcgtcactccatcactattttaaattaatccacgctctctaactgtggtggaaattaattgaaaaggtgagaggaattgccaaattaatacgcaggaataacaatgggaacttttgcctcattgcttgaatccgggtgagcgttctaaaagaacgctgagagtaaaatcttacaaatatcgttccgcctctttccgggggttccctttgccgttgttaccggcgagggggcggacggcgtaatgccttcttgtgtactctttgccccagtagtgtggatcacagtctaaaattaaggtcgccatcagggcatactaaagcgagttgataaactctgaaatttcactttggtaaagggatcgccgcaatgcacagagaacggcatagtatagaaaagataggctggctccgggctgcagttctcggtgctaacgatgggatcgtctctactgcaagtttgttattgggggttgcgtctgccaatgcaacacatcaaagtattcttttgactggtattgcaggtctggttgctggcgctatgtcgatggcaacgggagagtatgtctcagtgtcttctcaatcagatactgaaaaggccgccttggctgaagagcaagcagagcttgatgctgattttcaaggtgaatttcgggagctgacttcgatttatattcatcggggccttaatgtggcactagccagacaagtggctgaaaaattgatgaatcatgatgcgttaggtgcacatgcgcgtgatgaattggggatatcagaaatcactactgcccgacccttacaggcagcgtgggcttctgcagcgagtttctctgcgggggcgatattgccattactggtagcggtaatctcttcggctagctgggccattccagctattgcgctatccgcattggtttctttggctattttgggggggattgcggcgaaagcgggtggagcaccaatacgttcaggcgttatccgtattaccttctggagtgcgcttgcaatgggtgtgtcatcgggtgttggtatgttatttggttcttttattggctgagaacagaactgtgcagcgttttataaggaatatctgacgattaaaagggggattttaaatcctctaatgtttacttaatttaatagggataaattaaagtatcaacattcagagggcgagccatgaacagaaagtttgcacctggccaaattttattccattgggtcatttttattttgcttgtactcacttatgcagtaatgaaattaaaaggatttgccataagggcagtaatcctcgtgaatccatgaagagcattcattatacactaggtgtcagtgtcctgattttaatgctaattcgcacaatactaaaattgacaaataaagatcctgatatcactccaaccgcaccacactggcaaattgcagctttaaaaaccgttcatggtattttgtatcttttgtttaacagcttgccatgacttggtgttttgtctctgcattatggccatgtcgaatgttaattttctcctccgcgataccgatcgcggaggagaaaatagtattatgcagaataacttaaaagaaattcatgaacttattgccaatacgggctacttcattattggtttacacgcggcggcagcaatattttatcactctattaatgcggagtaatacgttggttagaatgttgccagaaaagcactaagttcatcaatgtgcctatcaggtcatatgggattagcggatactgctattttgtttcaggagcaacgcgcagagacgtggtgctactatcgttcatcacctcgtatacctgtctgaacgagcagacggtaatgttttgcattcttatgacatacgcggcaattcatgaaaattatttatataaaattgttaattttaagcaaaattgtcggattgctcgcattgttctacagttgaaaggagctaatgttttgaaagggaagtgggttaggctgataaatgaatgcgacccctttttattgacaggtaatttttgcgggtgattggatgattcatgcattttctgtacttgaagataaatgtaggacaatacctgcttgggtaaaatcgtttcgctatatatcatcagataagcgtgatctcagggttgatctgctgcggggcattgctctggtaatgatggttgcagcccacattgaagtgatgtcgatattgaatatctttacctgggagcgttttggcctaacaaccggcgccgaagggtttgttattctctcgggatttatgttgggtgtgatcaatcgccagcgcttaaagaaagacgttcttctcactataagctattcattatatcgacgagcagcaaaaatatatgtagttaatgttgtgattatacttagtgtttttctcttaactaaactcaatttcataaaaacttttgaagtaacccattttactgatcgcttttcagaagtaagttatacgctatatccactttacgaccagctaaaagaatcctggtttaatatggtgctctacttacagatcgggccccatcagagtcagattttgggcctgtatttctatctgttgctggtaagtcctatctttatctatttattgcagcgcggctgggtaggtgtattgctattgttatctctggctttatatatcacctaccacattaccgggatacgacttacatcggcggagtttgagtttgcttttccatttttggcttggcaatttatttatgtcttagggatgacgattggctggtacaaagaagagttgctctctttagcccgtactcaggccggattttggattttgtccgttatgatattatttacgctggtaatgatgtttattgcgcagaatcataccaacccatttatgccctatgacacaatgctccatactataagtgcgaaaaacttcaattggttctatcagaactttgctgaaaagaatgcgctgggtccactgcgcattatcaatgatttcactctactaacaacgtgttatctggtgttgagttacttttggaaaccaataaacaagatgtgcggttggttcctcataacactaggccaacattctttgtatgtttttattatccatgtgtatgtggttttattggttagtcaggtagtggattttggcctatggcaccgagcatggttgctaaatacgctggttcatctctgcgctttaatgttgttatggctatttgcaaaatatgatgttggcagaagattcattcctaactgatttgtattttttcgactcaatcttattaagaggtcagcagtgaaaaatactccatctactctagataagaatcaaattactaaactacgtaattgcattctttatgaactgaaatattctctcggggtggcactgtcaacggcatcatccagtgaaatttttagtgcgttagcattagttgtgcgacgcaaccaaactgatgattattttaacactcgagaacgacatcatcaggcaagaaaaaaacgtatttactatatttctatggagtttttaattggtcaatctttgcgaaataacctaataaatcaagggttgatggaaatagccaacgcagcgttagaatctcttggggtagattttgaagttattgtaaaaagtgaagaagatgcagcattaggtaatggaggattaggacgtctggccgcatgttttattgactcaatggcaaccttggatattgctggttctggtcacggtatcaaatacgaatatggcttgtttcaccaacaaattcaggatggacaacaagtagagaagcctgatgattggcactcgacacactcaccttggctaatagaacatcaaagtcaggccatgataattccgctttatggccgcatagttgaagtagaagaccagcagggaaattacaatccaatgtggatggattggaaaataattattggagtacctcacgactacctagtctctgggtacattaatcataccgtaaacgcgttgcggttatacagtgcttgcgcttcagattcatttgatattcatatttttaatcatggcgattatttgaaagctgttaatcaaaaaatcgcatctgaaaatatctctaaagtgctttatccctccgatgaagtgttggcagggaaggaattacgtttgacacaagagtattttctggtggcttgtacattacgcgatgtgatgcatgatttcttcttactttccaatgatattaaacagttaccagagtttgttgccattcaacttaatgatacccatccggcgctggctattgttgagctaatgagaatattggtagatgaacatactgttgattgggatatggcctgggatttgacacaacgggtttgcgcctacaccaatcatacattaatgccagaggcgttagagaagtggtcagtcaatttattcgagctgttactgcctcggcatttacaaattatctatgaaattaatcgccgtttcctactggaaatacagagatggcgccctgaacggtcggatttattagtatcaatgtctttgatcgaagagacgcctgaaaaaaaagtgcgcatggcctatcttgctattattggtagtcacaaagtgaatggggtagctaaacttcattctgaattaattaaatctaatcttgtacctgatttttattatttaatgcctgagaagttcaccaatcagacgaacggtgttacacctcgtcgctggattcagcaggctaatccccggttatcggcgtttctggattgtcacttaggcaatgaatgggttaccgatctaacactcctgagtaaacttaaatcgttagcgaaccaacgtgacattattgctgaactggctgaaataaagaaatttaataaattaaagttaagtcagataattacgcgtcagcaagggattatcatcaatccagaagctatgttcgactgccagattaaacgaattcatgaatataaacggcaattactcaacatcctctatgtgataaacctttatcacaaaattctgaacggaaaagaggttatttcgccgaaagttcatatcttttcgggcaaagcggctcctggctatgcaatggctaaattgatcatccagttgattaatcaagttgcgctgaaagtgaatagtgatcctagagtcaatgaacaacttaaagtggtttttttagaggactataaagtttcactagctgaaagtattattccagccgccgacttatcagagcagatatcaactgcgggtaccgaagcctcaggcactagtaatatgaaactggctatgaatggtgctttaactatcggaacgttagatggcgctaacattgaaatcagagatgctgttggccatgaaaatttctatgtttttggcttgtccgcagaggaaattgctgagcaaagaactagagggcgatcgtcgtatgacgagtatttatcccacccagaaattaaagaaactgttgatttactgatttcaggtatttttcatcccaataaaaacctgttttcaccgatattccatatgctggtgagtcacggtgaccactatttccatttggctgattttaacagttattgccatgcccaatatcaagtattgaccgactatagtgatacttacagttggcacagaagagcattgaatactataagtggtatgggcgagttttccagcgacaggactattcgcgggtacagcaaggatatttggggtgagggtaattttaagtgaaatattacaaaccactcatgctattacttggttggctacttttcagtccacccgtgattgcgagtgaaacaactaacacatccgctgttaaattatttaccagcccttggtctcgtcttttttctggtaatgatgacacattttcgacggcattaacctatagctcgccattggaaaaaagtctgattaatgttcctacagggagatattcttcagaagaggtatacaaggtaaatcaacgggggctttttagtatgcagtattcccccataagttacttttttgccaatatgacaattcgcgtcccattgcaaaatgccagtaaatacagtaccgattacgtttatagtttcggttatgatgattggcacccaggaactttcagtctggtctatggcaattacaacgataataatagttttttcccggcagcaggaacccagagcactcgatttgaacaaggttcatggacgttgggttataaatttaccttacctaagccggtagaatccgcattattgattaacaaaagtgatgcgctagtttgtcaggttggctacagttatgtaccacgttatttctctgacgcttcatcaagcattgaagaaaataaaagtagtttgctaggaagttgcggttataccctcctgcagcactatttcttacgtttatctgcattttactaccctgaccataagcagcaacagccgtgggattatgattatacctacagtattggctatacgtcgggttatagccccggttcctggtcaattcattatgataactataccgggactcgctacccgtggcggcagaatgccaatgcgaactttcgtagtgggacaataaatctcagttggacattacctctataaattgaaggcgtaagaatctgtgctacgcttaattacgttgttaatagttaactgagcataatgtcttttgcaagtatgaaagttcatggacgtgggcattctctctttaagatgatgcttgataaattaagtttatatgaagcttttgggtaacttatgcaaccacatccttccgctacaggtgtgacatccattcttgttgttgatgattcggcaagttatcgctttttactggttaacctactaagaaattggcaattcactgtttttgaggcagaaaatggtcaagacgctttggctatccttgatagtaattccatcaatatggtgatcagtgactgggaaatgccggttatggatgggttgaaactctgtacaactatccgaaaacaatattccgatcgctatatttatttagtattgataaccgtgcgtcaatccgtcgaggatttgatcgcgggattagatgcgggtgccgatgattttctgtcaaaaccgataaatcaaagtgagctacgcgcccgattacatgcgggtgaacgtatattaatgctagaggcaaccctcgatgctcgtaatcagaaattgtcccaagcctatgaacaaatagaaaatgacttgcaggctgcggcaaaattgcaacgtagtgttttacctgcagaaaagctaatggtgagtggttttcaagctgaatggatgtttataccatctgcttatgtttcgggtgacttgttaagttttttccaactgggtaatcaacacattggtttttatagtattgatgttgcagggcatggtgtggcggcagcgatgctctcactgtcagttgcgcgccaatttcttaatgggcgcacggtggataacttactgatttcgcccgcagataccccctctggttatctgattaccccgccacataaagttgtcaacgaacttaatcgccgtttttgtatagagaatgatgatatagccacttatttcactcttatttatggcgttattgatgttcaaaccgcgaccggagtgctttgtcaggcagggcatccgacaccttttattgtcagtagctcaagtcagattacgcccattggtgaaggcggggcaccggttggacttattgattcgatggactatcaggacacggtgttcactctggcttcgggtgatcggctctatttattcaccgacggtattattgagtgtgaaaatgctgagcaagagctttttggagaacgacggttacaagaattactggccgctagtcagcgcgacagtgtgcaaaccgtttttaggcaagtacagcaggcattgaaatgctggcatcctgcgcaaaaaaatgaccatcagagcgatattcataatggacgttctgcatttagtgatgatatttcgttgctggtaattgagcgtaataacaattcccttctcctaacagaattgtaaggaagaaataatgaattttgaaactaaaacaattgaaaatgtattagtgataacccccttgattaggcgactcgatgcatcagtttcgctgaaatttaaagaagatatacaagcaatgattgcccgaggagccaataatattttattggattttagtcgggtagatttcatcgacagtagttgtttaggtgcactggtttcgttgttgaaaaccttaaatggtaaaggtgagttggctatttgctcattgaataacaatatccacggaatgttcaagttaacccggatggataggatatttactatcggcactgatcaacccgataccatacagcagatgaatttcgtagcgccttgatttatagggagtaaatatttatgaaagccatgatccttgctgccggaaaaggaaccagagccagaccactgaccaccatattgccaaaaccaatgatcccattaattcgaaaacctattatggaatcaattattgaacatttaagaaaatatggttttaatcagttaatggtgaataccagctatctgtctgcggacattgagaattatttccgtgatggccatgcctggggagtggaaataggttactcttacgaaggtattatggagtgtaatacttttgttgataatgttttggggtctgccggtggaatgaagcacatccaaaatttctcaggtttttttgatgaaacctttgtagttgtttgtggtgatgcattaattgatgtggatttcgatgaggtattggcattccatcgagctagaaaaagtttggcaaccttggttatgcgcccagtctcggcggatcaggtaaacaaatacggtattgttgttactgatgagcagggtagagttagtaagtttcaggaaaaacctaaaaatgaagatgcattatcaaacaatgccaatactggaatctatatttttgagccggaaatattcgattatattcctgatggggttgaatatgatataggtagccagctgtttcctaaacttgctgagttaggtgttcctttctacggtattgccttgccattccaatgggttgatattggatctctacaagatttttggcatgtcaatcgcatgatccttaatcaggatttacctgattatcccatgccgggaattaaaattgcgcctcaaatatggtgtgggcttaatgtcaaagccgacttttcgaccttggatattgaagggccagtctatattggtagtagcacagaaatacaatctggcgtgacaattagagggcctacaattattggcgcggggtgtttattagagcaaggtgcggttgtcgaacaaagttttattgctgattatactcgggttgggggcattgcacatttgtatcaacagatgatttttgccgggaaagttatctctccagacggtacagcaattgatttatctgaagcgggtttacactggcttattgatgataaacggcgtaaagatattattatggcggagaagtctttatttgaagaattgctaaataaagatacgttgatatgagttatcgccactatgactcacaaggttggttaatgaaaatatgtttgcctgcatcattatctagcctgcttgttttacatgaaaagttaatacaattcattcaccccttagagattgattcgtccagcagttatgctatggaacttgcattgaatgaagcatttatcaatattgtaaagcatggtgttaattatgattccactcaaaatattactattataatgcaatatgacaatcatcaactagccgtgactttacaggataaagggaagcctatacccacagaatttttacaaaataaaagcggattatctcatatgcctgagttgttagcgccggattcgtggcctgaaaacggtatggggttgatgatgatgtttaatgctgttgatgacatcagttatacagtaaaagagggagtcaattatctatcgttgataaaaagaatagaagagaagacgtgaaaattatgtttattcataaaatgatgctcctttaaccccccggcaatgggttgatttatctcacttattttcctggattgactgaggtagtgataatggctttttatttctcttcgtttgaaaacaggaaaccaccattaccactgaaaactcattgggttactgagtttttatggcaaagtctggcggttgctgcgtttatcttgggggcaaactacatccgctggcgctggatgaattcacttaattacgatgcgctttggtattcaatccccttagtaatggccgaaacactggcttatattggttctattttatttaccataaacctatggaaagtaagagatattcctgttctccccgcacctgaaaccatcgatgactgtatagctcctgaagagaagcaagaaaatcgccagataaaagttgatttgtttattgccacctataatgaaaatgtcgaattggtgcgcttatcgattcgtgatgcactcgccgtcagctatcccttccctttagattatcgtatttatgtattagatgatggtaatcgaagcgaaatggaggctgtcgcagcagaagagggagttaattacttaagtcgggaaaataatattggatacaaagcaggtaatcttcgtcatgggctggatatgacggacggtgactttgttattatctgtgatgctgatacacgagttttccccacaatattgacgcatactttaggatattttcgcgatattgatgttgcttgggttcagactcctcagtggttttatgatttaccacagggcaagcgattacctgaatgggcaaagcaaaagctagggtcgacaggctattttgtcggtaaagggattgagaagttggttggcccgctcaccgtggggcatgatcccttttttaatgatccgcaaatgttttacgatgtcattttacgcagacgtaattgggctaatgcggctttttgctgtggtgctgcatcaattcatcgccgtgaggctattatgcaagctgcgttacgtcgctatgtagataatatagaagatgagattgagaaatatacaagtgacgtaattgataaacaaacccaggcagacttggctaaagcaatgttacctcatgtggtacaagataccgagctgatgccatataagtttcatgtttcagaagatatttatacctctatcgttttgcatggtgatcctggccgtaaatggcgatctgtcctgcacccgcaaatagaatcaaaaatgctctcaccgcaggatttattgacttggatgatccagagatttaaatatgcagctggttcaatggatattgcgttgcatgacagacttttctccagtaagaggattaagctcagcgcaatacaaaaattaatgtatgggactactttctggtcctattttgcctgtatctggaatacggtatttttgattgccccattgatttatcttttcacgggtatcccccccgtttcgacttattcatctcctttttatttgcattttttgcccttcatgattgtctctgaattagcatttatgtttggaacatgggggatatccgcatgggatgggaaatcgtcttttcttgctttattttctatgaatttacgagcattggatacagtgctccgaggagagaaaatcaagtttcatgtgacgccaaaagaacgtcaacagggcaattttttatccttggttaaacctcaactcgccattattgggctgacgttattggggttgatttggggagcgattcagatagccgaaggcaacataaaagacccctccggctttgtgatcaatatcttttgggggggctgcaaatattgcagctatgataccgattgttttagccgcgctttggcaacctgagtatgctgtgcaggaggtttcctgatgtcattcaaatataacctccttaaggcgcgcagttatctagcgatggtgatcggtattttaatcgctttctctattgtgttgtatgtcgagaaaaactctcaagatatagaagattcccgtgtccatatcagctccagtattggccgaccattagcaccgactcctcgaccactgacttccgaagaaataatttgggctaaggctgcatggcaatattttattaataatactcagccgagtggtttagttaattccgtggataaatttccatcgtctacaatgtgggataccagtagttattttatggcgatgatttcagcacaacgaattggtattattcaacaggatgaatttgatacccgaatcagcaatgcattaggtgcattggctaaattaccactatttgaaggcaagttgcctaataaagcgtataatacacagactctgtctatggttaattatattaatcagcccagtaccaaaggtataggttggtcggctattgatattagtcgaatgatggtgccattaaatatattagtttggaattatccccagcatgctgtcgaggtcaataaggttatttcgcgttggcaattggaagcgctagtggccgatgatcaattacaaggatcggtagttgatgataaaactcagatcatttccttacatcaggaagggcgtattgggtatgagcaatatgctgcacgaaccctgcaactggttggtattaatgctagtttagcccttgattacactgcacatctacaatttattaaagttgaaggaatactggtgcctgatgatgatcgtatctcgcaaaaagagggggcgaatacatttatcgtcagcgaaccctatattttgacaggtttggaactgggttttgatctttattcatccgaattagcatggcgggtttttaaagctcaggagaatcgttttcagcgtaccggtatatatacctccgtcagtgaggaccatgttgataaagcaccttactttatttatagcacactgcattatgctgatgaagattgggctgtaattacggataaaggcgagcgcgttaatcagttgcgacaattatcaactaaatcggcatttagttggtatgccctatggcgcacaccttatagtgaacagacacgaaatcaattaaatagcttgatggattcgagtaaaggttggtatagcggaatttatgaagttaataataaaataaatacttcactaaatgccaataccaatggcgtggtgttggaaagtttggcttttatcaatggcggaagactactttgtgctgcctgtactcaggtgatgcaatccgttggcgcaacagataaacaactaaagtaggaagattttatgatgggaaatcagtcatttttgataaagataagtctcattcttaaggctggctgcttaatgttgattctttcgctcatgccgtcttttaataccttagccgaattaccgggtgataaattagctgctgaaaactaccctgtgcggcacggtgagttaacgcccagagagatggcggttgcagttaatgcctggcaatattttgtccataatttacagcctacaacagggcttgttaatgcagttaataattatccttcgaccaccatgtgggacagtgcatcttatttggcagcgctggtttcagctcgcgaattagggattattaataaagaagaattcgatcatcgtatgttaccatttttgaaaacactgaataacttatcgttatttcaggggcaattaccgaataaagcgtacaacacaataactgctgaaaaagttaactatcttaataagccgggtgagataggattttccgctattgatactgggcgtatgttaatttggttgaaaattattaaagaacgttaccctgaatatgctaatagtattgataacgtggtattggattgggatttctcacatgtcatcgatgattgcggtacgttatatggcgcgatattagataaaaataatacgcctcagtatgtacaggaagggcgattgggctatgaggaatacgccgccagtggcttccaactttgggggttttcaacctgtcaggcatcgcgacctgaaccttatgatttggcaaaaatttactgcgtattagtgccttatgattcacgggacccacgcactaataaccaacataactatgtagtgactgaatcctatatcttgcatggttttgaaatgggttgggatcgcagtgatgatcgggccaataaagcaggaagctacagtcatccgtggatgaagaactttgctaatcgtgtctatcaggcacaggaaaatcgttatcgtgaaacgggaatactgacggcgcgttcagaacatcagttggataaagccccttactttgtttacgacacggttttcgccgatggttataactggaatacaatcaccgaccaaggtgtttttgtccctgaaaatgcggcagtatcattaaaagctgcgttaggcatgtgggtattgtggcattcgccctataccgacaggctatttgatgcgatagagaatgccaatgtgaaaggattgggtttcaacgaaggactttatgagaatggacatgggccgataaatgaatttacggcaaataataatggcatcatgctagaagccttgttatttaaaaaagaagggaaaatacttcgcttcaccagtggtgatcccagccacagcgactatattccgtcgctgtgggaacggcagttaattaacgggtttgacacgaataacagcaaacgaaataggccatatattgatgcaactcctagcctgaaagcattttgtgatcaatcgggcatcgcgatacgtaaagcaccaaattgtaagagctgccagtgcgctcagtgtcaagatgaaagcagcagcaataataatttatttaaattaccggcagcaacatcatgcgcaaaacagtgacgtctgccgctattgcctgggttattggtgctgggctactgggtgctgcgtttacgggcggtatgtttgtggcaagcagtattactcccaattccgttgcctattcagcccgtagtggtgtgttatcagataatgagcaattatgggcgaaagtcgcttggcgttactttgttaataatacgcaaatgggcactgggttggttaattcgttggataattacccggttgttaatttctggcaaatcggtgacacctttgttgcattaaccgccgctgctcaattaggcctcattaatcggcaggagtttgatcagcgcctttcactcttattggcaacgatcagtcaattacctttggttgaggggaaaacgccaaatttgctttataacactgtcaacgggcagatgattgattatgctcatcagccaaaaccgttggggtggtcggcacaagatatcggccgcttaatggttggtttgaaagttgttgcacgtttttatcctgaatatgccgagtatctggataaggttctattacgatggaatttttgtcagattattgatggtaacggtgagttactgaaatcgtctactgttaatggccaatttatcgccaagccagaaggcgtgttgggttacagcgaatataccgcaggcgcatttgggctgtgggggtttcctgtaggaatatcagctaatcttccttataacaccacgttcatttatggcatccccatcgatttcgatatcagagatgctcgaataacctatgtacccactattgttgtcagtttgccttatttactgacagcgatggaattaaaaaataccccaatatttaaacagcagaaaaaacggatagataatatttatcgagtacaggaaatacgctggaaaaaagaacatatattgacggcgcgtagtgattacttgacctcggttgcgccctatcacgtttacgatacggtgttcgctaacggttatcattggaatactattagcgaggacgggcaatttcaccctgatttggcattggtatccacccgtgcagtttttggcttatgggttttgtggaatagtccttataccgatgcattaatgaagttgactcaaatgcagcatgatgaaaaacgcgggtggtatgaagggcgttatgaaaataatggcgcgtataacaagacaattagtctgacgaccaatgctatggtcttggaaacgctgctctataaagtggcggggagcttaattaataccgatcctactgcgggatatctggacgtgcgtatgagtgatgctttttcacgtccgcaattatgcctgccgcaagaaagagtcatccgtcgagaggtcgcatcgaaatgaacattaattatcggtgtagaacttctattttaagtttgggatttcttttgcagcttatctcgtcggttgtggttgctcagttgccatccacgtcagatttgtccggtcagtggcgaatacgggatggcaatccgccagcttctgaagcctggcgtgacaccttggatgacagccagtggcaatatttgaaagtgcccgctaattggtatagtgagggcgtcgatcatcaaggcgtattatggtatcgcactcggtttacattaccggttttagataccgatgatatggcgactttggtattcgatggcgtcgactatcaaacggacatttggctcaacaatcaacaagcagggcgacatcagggttattttcaacgatttagcgtcgatataaccgatatggctcgaatagataatgtgctggctgtgcgtgtagatagcccttacgaaactccggggaaaatttggtcatttcataagcaactaattaagggcgtgttcaatcatcatgacacccgacccggtggagcgtggtcggatcgcggacaagatgccaattcgggcgggatttgggctccggtggcgtcacatatcagtcgtggtgccgttatagataatgtactggccgtgcctgactggtcacgggggcttgaacatccgattctaaaagtgagtttggattatcgtgccaaccgcaaccgttctgttgttatgttgctacgtttgatacctgataatttcatcggccaatcttatcaactggagaaaagtgtttcactggttgccagtcagcataatgcacaaactctcaccaccaattttcttattgataaccccgcattgtggtgggtgtcaggtcatgggaaacaaaatctttatcggctagaggtcagtttctcggatcgttttggcatgatggatgaaaaacatgttcgcaccggcttacggcaaattgcgatagacccgcaagagcaaagttggtcaatcaatggcaagcgcctattcattagagggacgaactatattggtagcccgtggttgggaagcttgacctcagccgattatcaccgtgatttagttatgatgcagcaggccaatatcaatgccataagggtacatgctcatgtggctgggcgggcgttgtacgatctggctgatgagatggggatactactctggcaagactttccgctgcaatggggatacgataattcagcctcttttgccagagaggcagccagacaggccgcagatatgacacggcaatttggcagtcacccagcgattgtattgtggtctgggcacaatgaacctccctgggatgctacctggatgcaatatcgttattcagactggcggccagacaccaaccgggcgttaaccgcgagcgttgcacaggtgctcagtcaggatcatagccgaatcactcatgcttactcatcaaccgcagaacactattggcaagggtggtactcagggcagaaaaatgatcatcttaagccggcaactacctcaataatcagcgagtttggcgcgcaagccttacctgatttggcaacgttaaaaacgataattccgcgcgctgatctgtggccaaaaacgacggataaacaagatgaaggttggcgcacctgggcataccataattttcaacctcatgagacatttgaattagctaaagtgattcgtgggccaaatatcaatacgtttatcaataacagccaacagtatcagtcaagtttgatccaactcgccgcagagagttatcgacgccaacgttatcaaccggtcgctgcattatttcactttatgttcactgaaaactggccgtcaattaattggggcgttgtggactatctccgtcatcctaaaccgggttattttgctttgcagcgagcttatcaacccgttttaccttctatagaacctaaaacagaaaattggggtcagggacagacagggcgtattgatttatgggccatcaacgataactggctcaactatcaaaaagcatcattacattggaaaatattgcaaagtggcatggttttatctgagggatcgcagaaaataaaattaatggcggatagcggtcaaaaagtgattgaattgcaagttatccctcgtgggattcagccaatgaatgtaatgagtgacattattaacgaacggggtgagatattaggccacaatgaactcgaaattcacattcaaccttaactaatactgctcattattagcagagaatacttaagttcgtctagattgtggccgacactatcttaaatagtagagtgatcctatgctttagccaatagtgattataagagtatagatattatatgaatctttctccattcagtgcccatacccagcaatcaccctcatcttggctttcatttaagttacaacaaaatattttgctgccgctgtttattttcattgttgggctggttatttcaggtgtgggagcatggtggctttataacgaaattgaagccaatgcaaaaatagattttcaacgtaatgttgacagagtttctggggaggttgagcggcgtttcaatctacctatttatggtatgaatggtgcaaaaggaacctatgcggcggacggtgatctaacccataaacaatttcatgcctatgttgcctcacgtaatttaccggtggagtttcctggtgtgaggggatttggttttattcagcgggtgcaacgcaaccagttaaattcctttattgcggatgtccgagctgacggtgcaccaaactacgctctacgtcagttgcaagataaacaacatgatgatttgtatattattagatatatagagccatcagaaggaaaccaaggtgcggaaggattagatgttggctctgagccggtacgacgagctgcggtactctcggcaatagacagtggtaaaccgaccctttcaggggctattcatcttgtccagtctaactttaaagctcccggggtactgctttttgttcctgtatatatttatggctcaaatcctaccactccagctgaaaggcgggcgtcattagtgggtgttctctattcccccatcgcaattgcagaactattaagtgatattcctgagtctatgaatgggcgagtggatgttgaactatttgatagtcttaacgatttgtctaataaaaatttgatctttgacgcggacagtagcaaatccgctgatttttcccctaccgaactgcaaagcgataaagtcctatccgcgagaatattccatagcaccaatgtattacggttgccgggtcgtgatatgacactgcgaatcagtagtacacctacgttcgaagcgcagatagagcgttatgtcccctggctgttatttgcttttggacttttgctcagttcagcattcgctttacttattcgccagcaagtcagtgggcgtaatcgggcagaaatgctggctcggaatatgactgcagatcttgaacgcttggctttagttgccaaaaatacttctaacgccgttgttattaccgatgtaaaacgtaatatcgtttgggttaacgaggggtttgaacgtattaccggatacagccaagccgaagccttcggcaagtcgccggggagattactgcaatgcaaaaatacagatcggggtgtagccagtcagatgagggtggcgttagatgccggagagccatttaagggtgaaatcgtcaactgtactaaatcagggcaagaatattgggttgagctggagatccaaccgcgttataacgataagaatgagccaatcggctttatggctattgagtcggatattagtgaacgtaaagcgacttatcaacgtcttgaagtggccttgcgtgaaaatgatgctttactcagcacccttaatttacacggcattacttctaccgcagatcgagatggaataatcacggatgttaatgacgcattttgtactattagtggttacagccgcgaagaacttatggggcagacttaccgcttagttgattctcatacgcactcgactgatttttggcaatcgatgtggaatgatattgctaatggaatctcgtggcgtggcgaaatttgtaataaagctaaagatggttctttatattgggtcgatactacgattgctccgtttaataatagttctggccaggttgagcgttatatttccattcaagttgatattaccgccaataaaaatcaacaagccaatcttattattgctaaaaatcaattagtcagagcggcagatgtcgctgagttaggtatttggacctggaacattccagaagacacgctttctttcgatgatcggatgaatgatatctatggtgtccctgaggaattacataatgctcctatcccgttggcatattggtatagcctcttgcatcaagaggatgttcccaatgttaaaagcgcgataaaagctgcattagaaaataaaagtgtctatcgtcaggttttccgtattgtggtgaaaaatcaagtccattttattcaatcaactggaacggttgaacaggatgaaaatggaaaagccttattgatgatgggaattaatcgggatattactcaacaacgtgaggccgaaaatatcctgaaaacagcaagagaagcggctgaaaaagctaataaggccaagtctgcatttttggctaatatgagtcatgaactacggaccccgatgaatgccatcctcggcatgctgacattactgcgtagaacgggacttgataggaaacaagctgattatgccgttaaaagtgaagccgccacgcgtactttactgcgattgctgaacgatattttggacttctccaaaatcgaatccggtaaaatggaactggaatgcattccttttgacattcatatcatgctgcgtgatttggcggttatcttatcgagctatctgaaggttaaaaaggttgaggtcttatttgatattgacccttcactacctcagtttgttgagggagatagtatgcgacttcaacagatattaaccaatctggggggcaatgcgctgaagtttaccgaacttggtgaggtggtgcttttcatcaaggttatagcgcaggatagccatcaagtgacgttgcattttggggtgcgcgataccggaattggcattgcgccagagaatcaggaaagtatttttagtggttttacgcaagctgaagcctcgacaacgcgccggtttggtggcacgggcttagggttagtgataagccagcgctttgttgcactgatgggggggacgctcaccttagaaagccaactgggtcaggggagtctatttcatttcactatcacgctgccgctgccttcttataccaatctggttataaataatgaaacaccagatacgttggcaagcagagcggaggcattgaatcatttacgggtcttggtcgttgatgataatccgacggcctgtaacctgatcaagcagatgggggaatcgctaaagtggagcgttgatgttgcaaccagcggtagtgatgcactgcaactgatgagacagcagcatgaaaggggtatgacttacggggcgctctttattgactggcaaatgccggggttagatggctggcagaccagtaaatgtgtgcgtgaaatgatgccagtagataacggccctattattgtcatgataaccgcccatgatcgcgaaatgttattacagcgtagcgaagaagatcaggcattactagatggttatctggttaagccgatcacggcatctatgttgttggattcagtgaacgatgcattaagtgaacgcaaacaacctgatgttgtgaaaccggcaatagccgaatctttacaccgactgtctggtataagactgttaattgttgaagataacttgaataaccaacaaatagcccgcgagttacttgaggatgagggggctgtggtcagtattgctaaccatggtaaagaggcgattgagatattagaacatcatccgtcttcatttgatctggtcttgatggatttacaaatgccggttatggatggctttaatgcgacaaagtatattcgaaaaagtattgggttaaaaaacttaccgattatagccatgacagccaatgcgatggtatctgatcgtgatgcctgccttgctgcgggcatgaatgagcatattggtaaaccctttgacttgaataatctaatacacatcgtcctaaaatacagtgggcaagctgatgttgccgccacggttagttatatgacccctcgcttgttatctgctgaattaaaaaatgttgcggcaacggcaggaattgatgttgatgttgcccttaatcgattaggaggcaatattacgctataccaaaaaatgctgtcgctgctcagtgaggatttggctaatttccccactcagttggagacattgttgactgcaggcgaccatatgtctgcatctcgtctgttacacactgtcaagggacttgccgcgcaactgggggccactgaactctctttgagcgcagggcagggagaaaagttatttagccagaatgcaatacctacagcagacacgattaatcaattactgagcgagatgagaaataaagtatccgctatacaatctgggatagtgacattaatccaaatgctatcgcaggataatgtgaggaatgtcccggcagaggtatttgatatacaacctattgagtcggaattgaatcgtttgatcttgttattacaaaactctgatatggctgcgttagaggtgatgaataaattgatgacgacttttgctgaacaacttaatggacaattatctatccttaatgatgcagtcaatcaattagactttgccaaagctatccagctatgccaaaccctaatggttaaccttcctactcggagaaataagaagacatgactataatccattctttttctcaagatttggccttaaatttaccaggggttgggaaacccaagatccttattgttgacgatcatccgataaatattcagatgctctatcaagcattttgttcggattatcatgtgtgtatggcaaccagcggtaaacaggcgctcgacgtctgtctcagtcaacatccagacttgattctgctggatgtcgaaatgcccggaatgaatggttttgaggtctgcaccagacttaaggcatcgccagacacgcaggatattcctgttatctttgtcactgcgcatattgatgaagagaccgaaacccgctgctttagtgaaggtgccgtagattttatcagtaaaccgattaacagaaacaccgttcgggcgagagtgaaaacacacttattgcttaaagctcaatctgacttattacgccaactcgtctatttagatggattaaccgaagtacataaccggcgttactttgataaacagttagaagtggagtggaaactatcaaatcgtaaccagactccacttggcatgattatgattgatgttgattttttcaaaaaatataatgacttatatgggcatcaggccggggacgattgtttgcggagggttgcaaaggttatccgagatacactcagacgccctgctgatctggtggcccgttatggcggcgaagaattcatctgtttgctccccgacaccgagttagttggagcaatggatgttgcggaaactatcagactgcatattcttgagcaaaaaatcccacattctggctccactgtttacccgtttgtcagtgttagtttgggggtctgttgtaaagaaacccatagtgtagattcaccctcgagtcttttgctcaaggctgataaacaactgtatctggcaaagaatagcggtagaaataaggtgagtggtcagtgtgttatctgagtgaggtataaggggctttttatcaacaaagataggattcgcgctcttcagtttagcgtggagcggttttagtgcgcatggcagatgaaacgagacatgcaccgctatcaattatgctgcggtatttattgaagattcaggcttgacgctttcaatatggatactgggaatataagtaaaagatctgcctaatgtcaccgtccaataaaccctaccaaactaaagccaatcagtgatcgaatcctgcaatctgttacagccttaagaattacaggtataatcctagaaattattcaactggtttagaaacgaagatgacaaaactcaccttacaagagcagatgctcaaagctggattagtaaccagcaaaaaaatggccaaagtccaaaaaatggctaaaaaatctcgggtgcaggctcgtgaggcaagagaggctgtggaagaaaataaaaaggcacagcttgagcgcgataaacaactaagcgaacaacagaaacaagcggctttatctaaagaacataaagctcaagtgaaacagcttattgaaatgaatagaatcaatatctcaaaaggtaatattgattttaacttcacagataataatttaattaaaaaaatagctgtggataagcttactcaatctcagttgatcagtggtcgcctggctattgctcgtttggctgctgataacagtgatgagagagagtatgcaattattcctgcgagcgtagccgataaaattgcgcagcgagatgcgagcagtattgtattaaatagcgcgcttagtcaggaagaacaagacgaagaagatccctatgctgattttaaagtcccagacgatttgatgtggtaattaacgctttgccgatcccgatatatgaaaagtcctaacgggcttttcattaagttttcatgtccaatccgttcagcgaaaaacgccaatgccgcgtatgattttcactgttcgcgatagatatcaggtttacagtcaacactatctgattaatcactctcatttccactttaatgccatactccgtgccttcgcggcagcatcatgagagatattttcgctatcagaacgggctagtatgacgggctttgatcaactcttggctgatgggatgaacaaaatgcaactcacttgcgtgcagcatcagccgcgctgtctgttcggtgccgggtaaccgaaggccgccatacaggtcacagcccaaaatggggtggcccaactgctgacagtgaatgcggagctgatgagttcgcccggtttccggtattagccgtactcgcgtcaatggcagtaacctcccatcttccagctcgcgataaaagcgctcaacgacccgataatgggaacgagcaggtttgccgcggattgaacaaatcgacatcaacggaaacagcgccgcatctttggcaatcgccgcgtctatcaccccttcatcgttgtccagatgcccgcaaagcagcgcgctataaactttggtcactgtacgtcggctaaactgctggcagagcgcggcattgatagccttattgcgggcaataaccatcagcccggaagtaccgaaatcaaggcgatgaaccagtgtacagccagggaatatttgtaccagccgatggtgtaccgagtcgagattttgcgggtttttccccgagagactgagcagtccggagggtttattgataagcacgaggtgatcgtcctgatagagattttcgatcttgtcatggcacggcggggcaataaaggtatcgataatcttagacatcaggtgactcggatagattgtgtgagcggatgataacacgctagttttaacggatcgttgctatcagcgatagtctttgataattgcatcgacatcgatgctcagtatggcgctaaaaacgttatcccatattgatcggattggatgaaaaggcgcctgtcacaaataaaatatctgagcatccggtcagcgtaggcggtattgctcggtatagcatcgctgttttgtccgtgccctcaaattggctggccgaggttaaagctatgttctcgaggacctgccatcttgcggataaggtaagctttttttcagcgtttgattcctcgatacccctcaaactggggagtctgctgttatgataaaaaagtcgtaatattgactaatcttattgcgagtgatggtcggatttgtatgatggagaatatcgggccaggcaagtaagtgagttggcaaccaaactttggttgccattttctgttcagtaagggacacccgtgcggtcatcgtataatggctattacctcagccttccaagctgatgatgcgggttcgattcccgctgaccgctccaaattttagatacaactgaggaaacgatgaaaaaatcactggctacgttggttttatcattgggttttgttgccgcatatgctggcgcgtcaacaactaaaaatcggctgcaatcgccgacgccaggtgttgtatgcgacacatacgtttgtgccgatggcaaaaatggcatatcagtgccgctgacagagcggtatttaggtaagaagaaaagtcagcgtttagcctctcagggggatttcgatcgcacgcaatttacctttgtaaatggcatattctgtgacgtgaaagaaagattatgccgtaaagatcgttattacggtattgacggaaaacacagtggcgccattgacacacagacaactgaatggttgttcggccagaaaaaatagcgcgaatttcgtattcctcgtggtgcttaacactccaaatcgcaaggctcacttcggcggcggtatttttaaacgatgccgatgaaggccgcgagcattcccatggggctttgcccgtagaaggttcatgttgaatctcaattcgtccaaccgccatcggaataaatggcggttggcgagggggagttaaaacgagattacttcactttggttatttgtttgacatctaactcaacggagttccagtctttatctattttcccttgcaattctacggtatctttcggggtcaccgtcaggccataccaacgcttatgatcgatatctacggtcatggtgccagttgcatcgcggaacaggtaatgatcgctgccaatacgctgctcgatgttcccgcgcagtgtcatccaagagtcatcccgcatggttttattgcttatctggttggtaacgcgtgagctcgcttcgctgcgccgattagcaacccgcctgagccagcgccagcctgacgatgaaacgccgctgccgttgactgcgattccaagtgaagtcaaaccgctggtgacggcgctaaacagcctatttgcccgaacgggtaatatgctggtgcgcgaacgtcgtttcacatcggatgctgcccatgagctgcgtagtccgttggccgcacttaaggtacaaactgaggtcgttcagctggcacaagatgataccgagatacgaaatcgcgctttagccaatctgacaaaaggcatcgatcgcgccacacgcctagtggatcagttacttacactatcgaggctggattcattatcggggttagatgatgtgcaagacattgccatgcaggatatcttgcaaactgccgtgatggatcattatcacactgctcaggcaaatggcgtggaactcatactggatattcgtcagccaccgtcacagcgtcgcggtcagcccttattattggcattattgatacgtaatttgctagataatgctattcgctatagtccgcgtggcaccacggtcaagatcacgttagatgcacagggatttagcgtcgaagacaatggctcaggcgttagccccgaatttttacaacgcatcggggaacgctttttccgaccgccggggcaagagacatccggcagtggattaggcttatccatcgtacagcgcattgcggtattgcatggaatgaccacgagttttagcgctgggaagaacggtggatttcggggcgaggtgagctggtggtagatttttgctatttcgttatttcaactatcataattggtgcagctggatacatataacactaacaaatattctgggtcaatgtagaagggagcagattgttagataactttacgtatatctttcttctattaatagattactgccaatagcattgaaatcaatcagaatgtgtatcggcgcgcgatgatattttatgtttggtaaataaatataagggattagttaaatatttatatcacttatatttaactaatcccttagatggaaataattatagaaatcactctgtttaatatttgtttataaaatatgctttttgaatctgatatgtttattcggcaaatttgataaggaggttattatgtctggatttgtggatttcaaactggttcattcaggagcgccagttacaattagtaaaacggctattctatatgtcgaggaaaacactcgcgaggctaatgtcaccaacttacattgtgttggtagtatcacccatgttgttagcgcaacatacgctgaagttcgcaagaaactacccaaatttatcgaaacaaaacgcagtgacaatggaacgccaaaagtggcattacacgactggaatgtttcatatatagagaaaagcagcagcggtactgcaatagtctattttacagagcaaggacttagtgttcctgtagcagagccgtatgagaatattattaaaattttccatgcgatataatattaaataacctgagcaaggtggggtaaagcccccactaaccctgaacttatcttggttaataacggttaaatcatgcatacattgatgatttactttcattagtgtatgcatggctaccaatgatacctcataggtagcctggctcttaaactgtgagttattactcgttaaactaagggcagcgaaggcgtttatgatgtactgatgtttttattcaaggtacttcgcttaaataagcgctggaggagggaggaaatcgttctaagaagtttgtaggtagtgctattgtgactagtatagtgaactaagattttctttttattattaattctgtaaaacttacctcgtgaagattgtaactctaaatcgtcgcttattatagcggttttcttttttaatcggctaaatagctggtggatgttattgttactaatggttgtctctttttctggccagattgaggaaagtaagacgtctcgatctattttttcaccgtttattgcgttttttatcaaaaccataaataaacaaaattctttatttgtcaattccacactacctttccagctgtaaaccactttgtcgtcaattgccacaaaatatatcatcgtcgctccataatgaaaaaagtcacatgcaaatatatcgcagtcagaatggttttgtaagatcactttcaatttcaaactaattatattgattagcctcatatttttattaaaaaataaccaaaccgcttaacattataatttctatttatgatgtttttttacttatacggttaatggtattggcttacattcattaaatcaggtcattatgaactgtagcccaatggaggaaggctaaggtaagtgattatattgtttaagtttcaataaatacaaagccaactggattttcatgatgtaagttacctgaggtattcttacgttcaactcacattcaattttaaccgtggaataataagtcacttttctattatatgcttataaataacttacagattaattttaatggttaacttgttgactatattagttacattaaataaaaattcactattaagtatcagtagtgagcagtttgattttaaaataacatccattgattaatccatgtctgtacaactgagttgcgccggcaaataagatgacgataagaagtaaacagatagatttagttggcgtaataatactatttgttgtgtcaattttcttggttcctgactaaaacattaaggtttctcagttaagctatatacgataaatattggcatctttctattgcaggatgatttctagtgctaagcattatagccaggagtaaaggaaataacgctttaacgataccaccattaatttaaaaaatggagtctgaaatggaaaaagaagaaaaaagcaatctcatctacgataaagatcctggatatgtgtgggacaataaaaatgaatgcgaaggagcagcagaagagacctatcaagaactcaattatgaaccctctatatcggcagataaactcacctggaccccaacccgattggcgaaaaccgtatttaatacttatgaggatgatgacgattttaacgtactttgttatttcaccgattggtcacaatatgaccccagaataatcaacaaggagattcgtgatactggtgggagaagcgcagatatattacgacttaacacaccggatggtcgaccctttaagcggctgatctatagctttggtggattaatcggtgacaaaaaatactcagctgatggaaatgccagtattgcagttaggctgggcgtagcaactgatcccgatgatgcgatcgccaaccataaaggaaagacgattcccgtcgatcccgatggtgcagtgcttgcaagcataaactgtggatttacaaaatgggaggcaggggacgccaacgaacgttataaccaggagaaggccaaaggactattgggtggtttcagattgcttcatgaagcggataaagaactggaattttccctcagtattggcggttggtcaatgagcggcttatttagcgaaattgccaaggatgagatattacgtaccaatttcgttgaaggtatcaaggatttctttcaacgatttccgatgttcagtcatctggatattgactgggagtatccaggttctattggggccggtaacccaaatagtcccgatgatggtgctaattttgctattttgattcaacagattactgacgcaaaaatctcgaatttaaaggggattagcattgcgtcttctgcggatccggcaaaaattgatgcagcaaatattccggcgctaatggacgcgggtgtgaccggtattaacctgatgacctatgatttcttcactttaggtgatggtaaattatctcatcatactaatatttatcgggatcctagtgacgtctattcgaagtattcaattgatgatgcagtgactcatttaattgatgagaaaaaggttgatcctaaagccatttttattggctatgcgggctacacgcgaaatgcaaaaaatgccacgataacaacaagtataccgtcagaagaagccttaaagggcacctatactgatgctaaccaaacgctaggcagctttgagtattctgtcctcgagtggacagatattatttgccactatatggactttgaaaaaggggaaggacgcaacggctataagcttgtacacgataaagtagcgaaagcggattatctctacagtgaagcaactaaggtgtttatttctctggatacgccacgctcggttagagataaaggaagatatgtaaaagataaaggtctgggcggattatttatatggtcaggcgatcaggataacggaatattgaccaatgccgcgcatgaagggttgaagcgacgaatcaaaaataaggtgattgacatgacgccattttatcttgattccgatgaagaattacctacctacacagaaccggctgagccacagtgcgaagcatgtaatatcaaataaatagcctcagataattaatactattaacgaatcatgaaatgattcgtaatggcctgttacattcaaaacaagatggaataatgaaatggataaatataataattattctaatgtaataaaaaacaaatcgagtatttctcctttgctcgctgctgcagcaaaaattgaaccagaaataacagtactatcaagtgcatctaaaagtaaccgttctcaatatagccagtctttggcagacactttattagggttaggttatcgctctatttttgatattgctaaggtttccagacagcgctttattaaacggcatgatgagtctttattgggaaatggggccgttatttttgataaggccgttagcatggctaatcaggtcttacaaaaatatcgcaagaatcggcttgaaaagagtaatagcccattagtgccgcaaacgtcttcatcgactgatgcatctagcgaatcgcagacgaacaagctacctgaatacaatcaactattccctgaaccttgggataacttctgtcgcccgggcgctattgaagcattggatagcccagcaagttatttattggatctgtataagtttattcaaagcgtagagttggatggttcaaatcaggcaagaaagttagaaacgcgtcgtgccgatattcctaagttatctttggacaatgatgcactgtataaagaagttactgcgttatcaattgtcaatgatgtactgtcaggcagcgccagggaatatattgaccagtcaggtcaggcagataaagcggttaatcaaatcctaggggatacgcattttccctttacactaccttatagcttgcccacccaacagataaataaaggactcggcgctagtaatattgaactaggaacggtaattcaacgtgttgaccctcagttctcctggaatacgactcaagaaaaatataatcaggttttattggcatatacccaattaagcagtgaacaaattgctttgctgagtttgcctgatgtgtttacccaaaattttttaacccagactgaactctccgccggctatttaagcgccagtaccacggaaatcttggcggaaaaagatctttctcgccacggctatattgtaaaagctgcggacaatataaaggggcctactcagttagttgagcatagtgacgcctcttatgacgtaattgagttgacatgtaccaatcaggctaaagaaactattaccgttaaattacgcggtgagaatattattacttatcagcgtaccaaagcgcgtatggtgccttttgataattcttccccttttagtcgacaattgaaactgacttttgttgctgaagataatccttccctaggcaacctagacaaaggcccatatttcgccaatatggatatttatgccgccgaatgggtgagggaaaatgtcagtagcgaaacaatggtaagccgacctttcctaaccatgacttaccgtatcgctattgctaaagcaggggcttcgttggaggaattgcagcctgaagctgacgcgttcttcatcaataattttggcttgagcgcagaagacagcagccagttagtcaaactcgttgcttttggcgatcaaaccggttccaaagctgaagagattgaaagtttattgagctgtggagaaaacttacctattgtttcacctaatgtcatctttgctaatcctatttttggcagttatttcaacgatgagcctttcccggctccttaccacttcggtggcgtttatattaatgcccatcaacgaaatgcaatgacgattataagggcggagggcggaagagaaattcagtcactctctaacttccgactggagcggttaaatcgtttcattcgcttacagcgctggctggatttgccctcccatcaacttgacctgctattaacatcggtaatgcaggcagatgctgataattcgcaacaggaaattactgagcctgtgctaaagtctctcggtttattcaggcacttaaatttacagtataaaatcacgccggaaatattttcgtcttggttatatcaattaacgccttttgccgttagcggtgaaatcgcattctttgatcgcatatttaatcgtgaacagctatttgatcaaccctttattttagatggtggtagctttacctatctggatgctaaaggctcagatgctaaatcggtgaaacaattatgtgctggtttgaatatatctgcggtcactttccagtttattgctccgttggtacaaagtgcattagggttggaagctgggacgttggttcgcagttttgaggttgtgtctagcctttatcgcctggtcagtattccgcagacattcggtttatcgacggaagacggattaattttaatgaatatcctgaccgatgagatgggatatctggcgaaacaacctgcctttgacgataaacaaacgcaggataaagacttccttagtatcattttgaaaatggaagccttaagtgcttggctaacaaagaacaacttaacgccggccagcctggcattacttttaggtgttacccgattagcggtggtgccgaccaataatatggtgacgttctttaaaggtattgcgaacggtttatcagagaatgtgtgcctgacaacggatgatttccagcgccaagagttagaaggagctgattggtggacacttctatcaacgaatcaagtcattgatgatatgggactcgtgcttgatattcatccagtctggggtaagtcggatgaagaaatgctcatggaaaaaatacaaagtattggtgtaagcaacgacaacaatacgctgagtattatcgtgcaaattttgattcaagccaaaaacgctcaagagaatctgttatcgcaaaccatttctgctgagtatggagtagagcgcagtgtggtgccgcttcaattacgttggttaggtagtaatgtttatagcgttttgaatcaggtattaaataatacgcctactgatatatctagtatagttccgaagttgagtgaattgacttatagcttattaatttatactcagttgataaattcgttaaaactcaataaagaatttatattcctgcgtctgacgcaaccaaactggcttggtttaacacagcccaaattatcaactcaattatccctacctgaaatatatctcattacctgttatcaggactgggtggttaatgcaaataaaaatgaagacagcattcatgaataccttgaatttgcaaatattaagaaaactgaagctgaaaaaactctcgttgataatagtgaaaaatgtgcagaactgttggcggaaatattagcctgggatgccggtgaaatattaaaagcggcctctctacttggattaaatccacctcaggcgacgaatgttttcgaaatcgattggattagacgactacagacattatccgagaaaacgatgatttcaaccgagtatttatggcaaatgggcgatttaacggagaattctgagttttctctgaaggaaggcgttggtgaagcagttatggccgcgttaaaggcacaaggagatagcgataatgtctaattctattgaagcgaaactacaggaagatctacgcgatgccttggtggattattatctgggacaaattgttcctaatagtaaagatttcaccaatctgaggagcaccattaagaacgttgatgatttatatgatcatttgttactggatacgcaagtgtcggctaaggtcattacttcacgtttatctctggtgacgcagtcggtacagcaatatatcaatcgaattgcacttaatcttgagcctggtttgtctattaaccagcaggaagccactgactgggaagagtttgccaaccgttatgggtattgggccgctaaccagcaactaagaatgttcccggagatttatgttgatcctactttacgtctgactaagacagagttcttctttcaattagaaagtgccttgaaccaagggaaattaaccgatgatgtcgcgcaaaaagccgtattaggttatctgaataattttgaagaagtcagtaatctggaaattattgctggttatcaggacggcatcgatattgagaacgataaaacctatttcgttgcccgaacccgaatgcaaccctaccgttatttctggcgatctctggatgccagtcagcgtaatgctaattcccaagagttgtatccaacggcatggagtgaatggaaggcgatatccgtaccattggaaaacgttgctaacgggattgttcggccgattatgatggataaccgcctttatattagttggtttgaggtggcggaagaaaaggagacggatagcgacggcaatattattgtatcgggacgttatcgcactaaaattcgtctggctcacttaggatttgacggtgtttggagttcgggaacaacgttaagagaagaagtgctggctgaccagatggaagaaatgatcgcggtggtcgatcgcatggaagatgagcctcgtctagcactggttgcatttaaagaaatgagtgaaagttgggacgtcgtatttagctatatctgcgatagtatgctgattgaatccagtaatttaccgactaccactcatccgccaaaaccaggagacggtgataaaggattgtctgatctggatgattacggtgctaatctggtttggttctatttacatgagactgccaatggaggcaaagcggagtacaagcagttaattctctatccggttattattaaccgggattggccaattgaattggataaaactcatcagggagactttggcactgtcgatgatttcacgctgaattctaattatactggcgatgaattaagcctgtatttgcaatcttcgtccacctataaatatgacttttctaaaagtaaaaatattatttatggcatctggaaggaagatgcaaataataatcgctgctggcttaactataaacttttaacgccagaagattacgagccgcaaattaatgctacgttggtaatgtgtgacaaaggtgacgtcaatatcattactggattcagtttgcctaatggcggtgttgatgcaggcggaaaaataaaagttactcttcgggttggtaaaaaactccgggataaattccagattaaacaatttagccaaactcagtatttgcagttccctgaggcgtccagtgctgacgtttggtatatcggaaagcagattaggttaaatacgctgtttgctaaagaacttataggtaaggcaagccgaagtctggatttggttttaagttgggaaacgcagaatagtcgtttagaagaagctattttaggtggcgcggctgaacttatcgatttagatggcgcaaacggcatttatttctgggagctatttttccatatgccatttatggtgtcctggcgctttaatgtggaacagcggtatgaagatgcgaaccgttgggttaaatatttgtttaatccgtttgagtgtgaagatgaaccggcattattgctaggcaaaccgccgtattggaatagtcgtccgttagtggatgaaccatttaagggttatagcttaacgcaacctagcgatcccgatgccattgctgccagcgatcctattcattaccgtaaagcggtctttaatttcctgaccaagaatattattgatcaaggcgatatggaatatcgcaaattgcagccgtcggccagaacgctggcgcgtctgagttattcaacggccagttcattattagggcgtcgtcctgacgtgcagctgactagtttctggcaaccgctcactcttgaggatgcgtcctataaaacggacagtgaaattcgtgctattgaaatgcaaagtcagccattaacatttgagcctgtcgtgcatgaccaaaccatgagcgccgtggataatgatatctttatgtatccaatgaataacgaattgaggggtttgtgggatcggattgaaaaccgtatttacaatttgcgccataacctgacgttggatggaaaagaaatcaatatggatctttatgattcaagtatttctccacgtggtttgatgaagcaacgttatcagcgggtcgttaccgctagaaacgccagtaagatgaacttcaaagtccctaactatcgttttgagccgatgttaaaccggtcaaaatcgggtgttgagactcttattcaattcggcagtactttattgagcctgttagaacgcaaagatagtttgagttttgacgcttaccaaatgattcagagtggcgacctttatcgcttctcgattgatttgcagcagcaggatattgatattaataaagccagtctggaagcattacaggtaagcaaacagtctgctcaggatcgttatgatcactttaaagaactgtatgacgagaatatctcttcgacggaacaaaaagttattgagttacagtcacaggctgccaattcgttgttgatggctcagggaatgagaacggctgccgccgctttagatgtgattccgaatatctatggtttggccgttggtggctctcactggggcgcaccgctgaatgctgcggctgaaattattatgattaagtatcaggcggacagcagtaaatctgaaagcttgagtgtttctgaatcctatcgtcgtcgccgtcaggaatgggagttgcagtataaacaggctgaatgggaagttaattctgttgagcagcagatcaatttgcagaatatgcaaattaaagcagctaataaacgtctggaacaggttgaagctcaacaacagcaggcaatggctctactggattatttctccgaacgctttacaaacgaaagtttatatacctggctgatcagtcaactctccagtttatatttacaagcgtacgatgcggtgctttcactttgtttatctgcagaagcttctttgctatatgagctgaatttgggcgagcagagtttcgtcggtggtggcggttggaacgatctgtatcaaggattgatggccggtgaaacactgaaattggcgttaatgagaatggagcgggtttatgttgagcaaaactctcgtcgtcaggaaattaccaaaacgatctcgttgaaagcactgctcggtgaaagctggcctgcggagctgaataagctaaaacaaaaaacgccaattaactttaatctggaagaacagatttttgttgaggactatcaagagctgtatcagcgcagaattaagtcggtttcggtcagtttgccgatgttagttgggccttatgaagacgtgtgtgcgcagttgactcagacctccagtagttatagcacccgggcagacctcaagacggtagaaaatatgctgactaaaagaacgtttgccgatacgccgcacttggttcgtagtattcaacccaatcagcagatttctttatcgactggggtgaatgatagcgggctgtttatgcttaattttgatgatgagcgtttcttgccatttgaaggttctggcgttgattcaagctggcgtttgcaattcaccaatttgaaacagaatttggatagcctcaacgatgtcattctacatgtgaagtatacagccgcgattggctcatcaactttcagtcagggcgtaaggaaaatattggccaatataaacaacgatgaataactgctgtttttgatcagctatttattttttcaatcatatttatctcacttggctcctttttaatcaaaggagccaacaaaaatagtggagttctgttatggtcaataaatatacttacacctcatctaaagcaatgtctgatattagtgatgttattggtgaacctttagctgcatgggatagtcaggtcggtgggcgggtatttaacgttatatttgatggtaaagtttataccaatacctattgggttgaacgctggcaggttcccggtattggtagttctgatggtaaccctcacaatgcctggaaatttgtacgggcggcaacggcagacgaaataaataaaatagggaatccaaccacagcagatgttaaaccgacggaaaatattccttcaccgatattggtcgaagataaatataccgaggaaacgtattctcgccctgacgtaaattttaaagaagatggctcgcaagggaacctttcttacactgcaacccgagtttgcgccccgatgtacaatcattatgttggtgataaaacaaaaccgaagctgtcggcttatattaccgactggtgccaatatgatgctcgtctagacggcggtggtagtaaagaagaagaacgcgggcgtggttttgatttagcgacgttgatgcaaaatcccgctacctatgatcgactgattttcagtttcctcggtatttgcggtgatatcggcaataaaagtaaaaaagtgcaggaagtctgggacggatggaatgctcaggcgccgagtttaggtttacctcagattggtaaagggcatattgttccgttggatccctatggtgatttaggcactgctcgtaacgtggggttgccgcctgaaagcgccgataccagtattgaatctggcacatttttaccttattaccagcaaaaccgtgctgctggcctattgggtggattgcgtgaactgcaaaagaaagctcatgcgatgggccataaactcgatctggccttcagtattggtggttggagtttatccagctatttctccgctttagcggagaacccggatgagcgccgcgtttttgttgccagcgtggttgatttctttgtgcgtttcccaatgttcagctgcgtggatatcgactgggaataccccggtggcggtggcgatgagggaaatatcagcagtgataaagatggcgaaaactatgtattgctgattaaagagctacgcagcgcattggatagccgttttggttacagtaacagaaaagagatctcaatcgcttgtagcggcgtcaaagcgaaattaaagaaatccaatattgatcagttggttgctaatggtctagataatatttatctgatgagctacgacttctttggcaccatctgggccgattatattggtcatcatacaaacctgtattcaccaaaagatcccggcgaacaagagttatttgatttatcggccgaagcagcgattgattatttgcataatgaacttggtattccgatggagaaaattcatttggggtacgctaactatgggcgctcagcggtagggggggatctgacaacccgtcagtataccaagaatggcccagcgttaggcacgatggaaaatggtgctccggaattcttcgatatcgttaaaaactatatggatgccgagcacagcttaagtatgggtaaaaatggttttgtgctgatgactgacacgaatgccgatgctgattttctgtttagcgaagctaaaggccactttatttcattagatacccctagaacggtaaaacaaaaaggtgaatatgccgcgaaaaataaattaggcggcgtattttcctggtctggcgatcaggattgcgggttattagccaatgcagccagagagggactgggttacgttgccgattctaatcaggaaacgattgatatggggccgctgtataatccaggcaaagagatttacttaaaatcaatttctgaaattaagagcaagtaagcgtttacagcgccaattgttatttaatcgcgattgatttctattaattatctagcctattaatttaaattaattgaaaaatcagatagcggaacgtggcgggttgttttattgcttatttaaaatggcgttatttataacctgtcacggtctggcaatgttcggctattgattaatagctgacaggagtctttatgcaaaattcacaggaaatggctatcacgaccctttcattgccgaagggcggaggggcaattaatgggatgggcgaatcagtgggtcaagcagggcctgatggaatggtgaccttttccataccattacccttctccgcaggtcgtggcgtagccccggcgctttcgttgagttatagcagcggtgcagggaatggcccttttggtatgggatggcaatgtagtgcgatgagtattagccgtcgtactcaaaaaggggttccccaatataacgaagatgacgagtttcttagcccttccggggaagtgatggctatcgctttaaatgatagtggttttgaagatgtgagaacggctaaccgtctacaaggtatcccattacctttcagctataaggtcactcgttaccagccgcgccttattcaagacttcatcaaaatagaatattggcaacccgttaaacaaactgatggcacgccattctggataatttattctcccgatggacaaacgcatattctggggaaaaattcccatagtcgggtggctaatgctgaaaacccatcgcagattgctagctggctgttggaagaaacggttacgcctaccggcgagcatatttactatcaatatagcggcgagaatcaagtcaattgtactgatgcggaaatagcgcttcatccacaggatagtgcccagcgttatttagcgcggattgactacggtaatatttcccctcaagccagtttatttgttttagatgaagaactacctaatctcacccagtggttattccatttagtgtttgattacggcgagcgagatatctctattaataaaattcctactttcgagggaggaaccaccggttggttagcccggccagatatgtttagccgctacgactttggaattgaaattcgaaatcgccgcttatgccaccaagtattggggttccatcggctggaggccttgaatgatcgagatgtgactgacgaaattcccgttttggtgaatcgactcacgctagattacgacctgaataacagcgtcagcaccttggtagctgtccgtcaggtggcgtatgaaacggacggcagcccaatcactcagccgccgttagaattcgactatcagcgttttgatacagggagtattcccggctggcaggaaatgccgcagcttgaggcttttaacggctatcaaccataccaaatgattgatctgtatggtgaaggtacaccaggcattctgtatcaggaaacgccgggtgcctggtggtacaaatcgccgcaacgccaaattgggggcgattctaatgccgtgacctatggggcaatgaaagcgttgcccaaaatccctcgcttgcaagagggagcgacgctgatggatatcaacggtgacggtcgtttggattgggtgatcacttcagcgggagtacgaggttttcatagtattcattcgacaggtgaatggacacattttacaccattgaacaccttacccaccgagtattttcacccgaaggcacaattagcagatctggttggcgcgggattatctgatttggtgcttatcgggcctaaaagcgtgcggttgtatgccaatcagcaggggaactgggctccggcgcaggatgtcacgcaggcagaaaacgtcagcttaccggtcattggaatcgattcccgtcaattagtcgcttttgccgatatgttaggttcgggtcagcagcatctggtcgagatcacggcagatagcgtgaaatgctggccaaatatgggacacggccgttttggccaacctttgactttggaaggatttagtcagccgcagaccagtttcaaccccgatcgggtgtttctggctgatattgatggttctggcactaacgacattatttatgctcattcggaatgtctagagatctacctaaacgaaagcggtaatcgctttagtaaaccaatctctttattactgccggacggtgtgaattttgataacacctgccaactgcaagcagctgatattcaaggattaggcatcgccagtttggtgatgacggtgccgcatatgtcaccgactcattggcgctgcgatctggcgttgaataagccttggttattgaatgtgatgaataataatcggggggcggaaacctgcttgttttaccgcagttcggctcaattctggctggatgaaaaacagttggttgaggcggcggggcagcaacctgaatgtcatttgccatttcctatgcatttacactggcgtagcgagatttttgatgagattacaggtaaccgtctcactcaagaacaagaatatgcccacggttcctgggatggccaagagcgggaatttcgtggctttggccggttgattcagcgcgatacggatggttttgcccagggaacggtcgacattcctactcatccttcccgaactgttagctggtttgctacgggaatccctgagattgacaccacgctatccgcagagttttggcgcggagatgatcaggcattcagccctttctcacctcggtttactcgttgggaaaacgattcagaggctggttccgatgttgcttttataccttcagagcatgatgccttttggctgaatcgcgcgatgaaagggcaacttttgcgcagcgaactgtatggtgatgatggcactcccgaagccgagattccttattcggtcacagaaatgcgtcatcaggtgcgggcgttgcccacaaccgacgccacagtaccttcggcatggtgttccaccattgaaacccgaagttatcaataccaacgggtggccgctgatcctcaatgtagccaacaagtagtcataaaagcggatcgctatggttcgccattattaagtgtggcaatcaattacccgcgacgtaaaaaaccggaaaagtcgccctatcctgatgatttaccggaaacgctgtttgatagcagctacgacacgcagcagcagcaactgcatctgaccaaacaacagcaaaattattttcatttgaccaatgacgataactggctgttagggctgccaaaagagcaacgaaacgatggctatcagtacgatcaggaacgcgctccggctaacggatttacgctagaaacgctcatcgcgtccaatagcctgatcggttcgaatcagccgtttacctatttgggccaaagtcgggtggcttatcagggcggtgtggatgaacaaccgtctttgcaggcgctggtggcctacggcgaaaccgctattctggacgagaaaaccctacaggcctttgtcggcgtgctggacagcaaaacacgcgatgaattgctgttttccgccggttatcagttggctccgcgcttgtttagggttgagtcagagccggatgtttgggttgcccgtcagggttacagcgaattcggtgactattcgcaattttggcgtcctctcagccagcgtagtacgttgttaacagggaaaactacgttgaagtgggataagcattattgcgtagtgatagaaacccaggatgcggctcaactggtgacacaggcgcgctacgattaccgattccttaccccatatagcctgacggatgccaatgataaccagcactacgtggttttgaatccgtttggggaggtgattgccagccggttttggggaacggaagcgggtaaagacgcgggatacagcactcctcaagccaaaccttttgtggtacctgccacgattgaggcagcactggcgttaagccccggaattccggtggctcactgcgccatttttgaacctgaaagctggatgcaaaaactgacgcagcacgatgtttccgaacgaatggcggataacggtactctttggaacgcattgctgcaggcgcgttttgtcaccgaagatggttatgtctgcgcgctgggtcggcggcgctggatggcgcgccatggtttatcggtgctgatgttgacgctactggccgagattccgcgtacgccgcctcattcccttactattactaccgatcgctacgatagcgatgaccaacaacaattacggcaacgtattctattcagtgatggttttggccgcctgctacaaagcgctcagcgtgttgaagccggtgagagctggcaacgcagcgaagactcctcgctggtggtcaatgtttccggcacaccagccttagtggtgacggataatcgttgggcggtttccggacgtacggaatacgacgggaaagggcaaggaatacgcgtttatcagccttattttctggatgattggcgttatctcagcgatgacagtgcacgcactgacctgtttgccgacacgcatatttacgatcctttagggcgcgaatatcaggtcattaccgcgaaaggttaccggcgtgaacgccagtataccccgtggtttgtggtgaatcaggatgagaacgatacggcagcaaatctggcgatttagttcccataagaaaattcgccctacattgtcgtggggcggatgaaaacgaggaaatatggtgttgaaagccattccctatcaaaaggataaccgagatgaaccagtttgattctgcgctccatcagggcacgccgggggttagcgtgctggataatcgtggccacgttatacgggagttacggtattatcgccatccagatacaccgcaggaaattgctgagcgtatagcttttcatcaatatgatagttatgggtttatttctcaaagtatcgatccgcgtctggcggaaagacgaaagcaggatagttcggttaagccgaatttgtcttactttacggcccttagcggcgaagttttgcgtactgacggcgttgatgcaggcacaatcttttccctgaatgatattgccgctcgtcctgccattagcatttccgccaccggcgtgtcacatacctggcaatatgaaggtgaaaatcggccggggcgggtactcagtcgcagtgaaagggagaaagatcgagaagagcgaattattgagcgcttttactgggctggcagtgatgcatcgcaaaaagcgaacaatctggcggggcaatgcttacgccattataacagcgccgggctgaatcaaacgctgagtattgcgctcactggcacgccgatatcggcgtgctttcagccactgctggagagcgcagagccggaatggcaggggacgaatgaatcggcgtggctggaattattgacgccggaaattttcaccacttacaaccgcgccgacgccaatggggaaaccttggtacaaacggacgccatggggaatatccaacggttggcctacgatgtagccggttttcttaaaagcagctggctgagtttaaagggcgggcaagagcagatcatagtcaaatcgttgacctattcggccgccggacaaaagctgcaagaagagcacggtaacggtgtgctcaccacttatagctatgaggcggaaactcagcgtttaatcggtatcagaaccgagcgtccagcggggcatttatcgggagccagagtgtttcaggatctgcgttatacctacgatcccgtaggtaacgtgctgcgtattaccaatgacgcggaagcgactcgtttctggcgtaatcagaaagtggtgccagaaaatacctacatctacgacactttgtaccaattagtcagcgccaacgggcgcgaaatggcaaacattccgcaacagagtagccaacttcccacactgtctccgattgataacaatgcatataccaattacatccgcaattatcactatgattctgctggtaatttgatgcaaattcgccatacatcggccgcagccaataatagttacaccaccaatataactgtttcaaaatacagcaatcgtgcggtattaagctcactaaccgacgatgtcgataaagtggaggcgttctttgacgccgcgggacggcagaaccaactattgcctggtcaaacgttaagctggaatgctcgcggtgaactggcgaaggtcacgccggttgcgcgcgatgggcaggaatctgacagtgaaacataccgttatgatgctaatagtcagcgcgttagcaaaatggctattcagcagtccaataacaatacccaaactcggcgagtgctctatctggcaggtctggaacgaagaacaattcatcaaggtaatacgttgtttgaaacgttactggtggtgaaaattggcgaagctggccgggcgcaggtacaggcaatgcactgggagcttgggcaacctactgaagtggctaacgacgaactgcgttacagttacgataatctgattggcagcagtgggttagaggtggatggaaccgggcaattgatcagtcaggaggaatattacccctatggtggtactgccgtgtggatggcgcgcagtcaacgagaagcgagtgataaagcctatggctattcaggcaaggaacgggacgccacggggttgtattactacggtttccgctactatcagccgtgggctggccgctggctgagtgccgatccggcgggtacgatagatgggctgaatctatttagaatggtcaggaataacccgattgtactccatgatcctgacggcttggctccgggtttttttgagcgcatcagttcatttcggaagaaagacacattaacgatttcatccctcaaaggaaccgggccgttttatacccgttcagaaagcgagattgacatcgattttctgttctccagacaggatagggataaagactttccgccacagaaccacaaggaactttctgcggaagatcgtcgagaggtgttagaagtttcctcaggtgagaatatcacatcagccaataaatcctctaaatggtatgcaggaacacattgggaaactaaaccattaaaaaataatactgatctggtggttcttcacaacggtgtgcagggtgccgcagggattaatattaatctgaatgatataaaacctggccgctccgtgctggtgacggctgggacattaaccggatgtacgatgattaccggtgttaaagggaataatttttatgctttgcatgccggaaccggaaccccatccgaaaattgggtaaccggtgaacacggagtgacggataatttccgaatgctgaataagttaattccggatgccggtattgacctgaatccagaagccgtgaatgacagcttattaacgatattggattattttgataatggaactatcgcttacaacggtaagaaaggcagtgaaatacatagagatgcagataatattctaaattaccgaaccacaggttacgaaaataccgttggtgtatctttcagtctattaacaaaagacaaaaatggtgaggtgtcggcatcaacgttattagagcttggtgagctaaaaccgcataagaaacatagaacaagaggccagtttggaatgactgaactgaaatacgaggccagaaagaataccgtcgttaaattacgctgaagcactagcctgcctgatttaatcatttatttaataaggcaggctattttttcatcctcactatgttgtttttatattttcaaactgcgctatcaaaaatagccataaataatatggggtgtcgagcaacattcttttagtacgtaatcgtatagttcacatctatcgaacgtattcccattcatgtgctcgtttttttcatgtttaaccaggagatatttatggacatacagctgtttagtaaaaccccatcggtcacggtgtttgataaccggggcctaagcgttcgcgatatcgcgtatcgccgtcatcctgatacacctaaagtgacggaggaatgtatcacctatcatcaattcgattttcgcggttttctggctcaaagtttagatccaagactaaatcataaagaggttactaatttttcttatctaactgatttaaatggaaatatcatatatacgcaaagcgttgatgcgggtaacacgctagttctgaacgatactgaaggaagatccgttatagcgatgaccaatattagcagaggggagaatggtaaggacgacctcagtctggccgtcacccgaacctttcagtatgaaaatgccccgttgccaggccgtccactgagtgtaaccgagcaggtgaacggcgaaaacgcgcggattacagagcattttgtgtatgcgggcaatacgccgcaggagaagaatctgaacctcgccgggcagtgcgtcagttattatgatgcggccggcctgatacagacagacagcgtgtcattaacgggtaaaccgttatcggttagccgtaagctgctgaaaaatttggatgatacgaacatcttggccgattggcaggggaacgatacttccgcctggaatagtctgctggcgacagaaatctatactactgtgactcgcacggatgcggcgggtgcggtgctgacaaccattgacgcagtgggcaatcagcaacgcgtggcgttcgatattgcgggccaactgtcagcgagctggctgacgctaaaaggagggcaggagcaggttatcataaaggtgttgacgtactctgccgctggacagaagcttcgagaggaaggcggtaacggtgtggtaaccacttatacttacgaggcggaaactcagcgtttgatcggtattaaaaccgagcgtccgaacggccatgccgccggtgcgaaggtgctacaggatttacgttatgaatacgatccggtaggaaatgttctcagcatcactaatgacgcagaggaaacgcgtttttggcgcaatcaaaaagtggtgcctgaaaatgcctaccgttacgacagcttatatcaattggtcagcgccagcggacgggaagtggcgggagctggccagcaaggcagtgatttaccttcccctctcgttcctcttccctctgattcttcggtatatacgaactatacccgcacttatacctatgattccgccggtaatctaatgcgcatcagacacagtgcgcccgcgaccaataataattacaccctaaacatcaccgtgagtgagcgtagcaaccgtggcgtaatgagttcgctaacggaaaaccctgctgatgtggatgcgctctttaccgcaagtggaagccaaaagtgcctacagcaagggcagagcctgatttggacaccgcgtggtgagttacgcactgtgcttttagtggctcgcggcgaaacggcggatgacagtgaaagctaccgttatgacggcagcagccagcgtattttgaaaatcagttcgcagcaaacgaatcacagtgcgcgggtgcaacgggcgctatatttgccggggttggaatggcgaactatgactggcggcgtggcggaagcggaaaacttacaggttatctgcataggtgaggcggggcgtgctcaggtgcgtgtactacattgggagagcggaaaaccagatggaataatcaacgaccagatacgctggagctacgataacctcacctgtagcagcggtctggaagtggatggcgatgggctggtcatcagtatggaagaatattatccctatggcggaaccgccgtgtgggcagcacggagtcatatagaaacggcatataaaacagtccgatactcaggcaaagaacgggatgcaaccgggctgtattattacggtttccgctactatcaaccttgggcgggtcgttggctctccgccgatcctgcgggtacggttgatgggttaaatctgtatagaatggtgagaaataatccactgcggctcaccgatccggatggaatggctccattagattggctggatttggatacgactaatgcgtctagggatattgttaaggccatttaccaactaaaccagatagacgggcctcatagaggcgttagagatacttatcaacgtatgactgaaagtaccggaatgattttacaggagaccttaaataatgaggcggtgctaaaaggtataaaacagaaagacaaagaaaaaaaatcaagaggaatgaaatttaccaattcaaaattaaaaacctacgccgctcatgcgggtgttttaaatacgctgcaaccggatccggtttataaagatggttttctgaatcttcccggaagcttgggtaataaaaatacctttcccggtgtggaactgattgaggataaagtgaaaccgtcactgagtcagtatcatcctgataaactaggtaaaagtcaaagatggaagccagaatcgagcctggggtattaccgagtcgcagatacagaagcatttatcactggcatccgtagccaatataaatcatcgggaacagatcttcatgcggtggttgaagggcgaattcgggatcatcttttagcaaataataatgttttacctaaaatggccgggatcgccggtttacatgcagaagtacaggcgctgaattatattatttctaatcctgatattgaaggtggaaacgccgaaaggctcaacggcagttatatctttacccaaaggctggttggggatgtgaatcaagatttccccgcctgctataactgttccggaattatatccggtctggaaaacgtcatgaccggacgagtcaacaatgatgtaagactaaagcgtcgaaagtcattttagaccagcgcgcaacgttgaaatagggcctgatgtgataggcattatttttgttcaaatctgaatacgtaagttataccgctcccaatattgggagcgtttaattttcgggtattattattcccctaaaaatgtaacgaccgttgatatttctggcggcatgagggagggggtaaacgttttacgaagtcacccaaggttaaatggtgttttatttgatcggccagaagtattggcaacgaataggattgggggaattaggtgatgattcttgttgggagtcgcagccagtcttttgaatccagtcctgccgacgatatttatttgtgaaaatacatcgtgatagattggcctaaccagcaggtacggaaaatattaaaatgttgccgtaaggcaatgcgagcagatcctacaattattaatattgaagctgttatcggttaaaataatggttctaatttttggtggagccaaaccgtcttgctatattaggttttatgattttatgattttatgattttatggttttatggttttatggttttatggttttatggccgtatttcttatcgccaggcgttaccacgaccaatattaatgaatttcgtaaatttaaggtgcctaaaatatgttcattagttattttcattaaaaataactactacaattagaatctctcctcacggcaaagtagagtttattcccatcacttccccgtaaccttcagttacaacatttgcggaaagtaaataattatatacctcatgtccatattggcctacaaatttgtagaatgaaaaaatcggatattctcaggtggtcgtaaaattggtgtggccgacgtatattgccgatttttgaaagtatattccgcttaaaaacgttagcttctttcatgtttattacgaagttcgggtttatattttggcaagaccaccgctataaatatctgtctattcatctcataattttcttagccttttttcaggtacatattatgcctttataccctttagttcccaataatcgtcaggtttcaattgaaacacagttaattgcaaatgccactacgccggaagagcgcaccgaggttaaaaatctgtttgcccagataaagatgctgcacaatgttccagaatcgcagacggtggtgtcatcaggccggccaagtctaaaaaatgtcttgttgcatggattgttggcacaaggcggtatgccgttaacatccgagcgggccgctcctgtgctgatcgcaggacacggagctaatcctatagcccaaacgctggggcaggttcgaaatttacagcgggaaatcgcaaccactcccactcttctaaccgaagaaacaaagctgcgtatgccacgctatgcggtatttccacctaaaacaacgcctcaaccgccggttctggatgacgtcaaaattgttaagatgtttgatttttcctgtatgaataacggcgaaaatctgacttttgcacaaatactacgtcaaattggtaaaactttgaggcagccaattaccatgatgacggttgaaagtaagaatatagatagctggaataaaggccaagggtgccctacgaatcaggaaatagagaaagcgaccaatattaccgagaagattgattctattacttctcagcttttaactttattgcccggtagccagcctttggctattgctcaatatattgtcggacctttgctggaacacgcggctaatgatcttgaaggaaagcctacttcgccagaagaggaactgaatttattacagcaagtgactcagcaagccaaattcagcatgagtgccagcacgcatagtgaacagcaacgcttatataccaggccaatatctgaaccgaaactaccacaggtagagctgccaaagttctatctgaagaatggagttaaccatattaaactggcgctcaatggcaaacttcatgatgttcctctcgttgagcataaagggaaaagtttcgctgtgttgcctaaaggaaaaaatggcggagaacgccggcagcaagtctatttcagctacctttcgcaggagtggaaaacgactggcgatggtaaattcattcgctttagtaaattagatcagcgtgtggcacatgaactctcccttcattctcgccatcgccataaaactgccgacggcaacgccaacgtttacagcgtacgtaatcctgtttcatctcagcctcaacgattgcaggccattgaactctatggtcgattggtgccttatcgctacgatttggccagtcatgagcaatttgtttacgatgctaggcagccagaatccacgggtcataaagtagaatatgcgaatcaagaatggcacattaaagcaccggtctctctggacgtggtgcctgaagtgtctacggccatgggtaaatatgatattcaaccgctgcagttgaatgaagcgaagctttctgcgccaaaccatttcggtattcaacgtacccgtaacggaaagcaggtgattaagattgatggaaagcattattcaatttctcaacaaggaaagcagttgctactgggacatagaaataatattcctatcgagctgacatcaggggaagggagtaaggtaaagctggcattggcgaatacaggaacggcgggtaataaggcatttaatctggtagatctgccaataattggtaaatccttgaaggttcaaatggctcgtaaggttattaccaaatccttgccaattgctaaagctaaaattgaactgactcttgaagccatggataagcccgaactcagagaacaggtgaaattagcgcaaaaagcgtattttggcagagagtttccgcttaaaccacagaatgaaattatactacgtaagacgttgagtcatatcaaaaatgacttagagcgtattagccatcgtaatttcagtttcgacagtcaggtaggagagacaaatacggtggccgagttgtcaaaagatcaataccgtcagttgggtagaaatcctaatagcaaaataatcaatgtaggtcgcgacggttttcacacctattacaaaatgatgggaaaaagtaagcaagcggtggccgatgtactcattcatgagttgtctcacggtgcgccaaactcacttgattttgtgtatataggtactcggcagcagacgaaagtcggcaacgttgatgtgttcgaactgattaatctcggaaataacaatctcaataacccagatgcgggtcaggcaccgcaaagtgtatatgcgggaagcgatctcaaggatttcaatagtattaatacttcgggttcaaaaggtttgaagaatgctgactccattgcacaatatgtttcctttttgagtaaagcagaacgaaatcctgacgcttttaatcaggattatcagtctctgctaacggcagcggaaaaatccaatgacttccagcagcgtgtagaagaaagcgtgccagtcagccgcagccgtcgcgcggtagagtcgattcatcagccgccgtctggtcttctgttagctatagaaagagattctgggcgctatcacctctatcgaccactgtagtgttaatccgaatggctaaggttataatgctgtcatgacttctcgccggataatacatcatactttcttgtttatccggcgatgccaaaaaataaagagctaaaagatgacattatttatgtggcagataatgaagatgtattgccgatattcaatagtaaaaatacctgcatagcttgataaagtcgaaagtttgaattttcgtgaattaatacgacgagaagtcagagctttgcggagtatttaaccctatcgttcggtcttttcattgtgaagattgaaattagaatgattccaatataagaaataaaaaatgaatgggaaatagcaggattactcactatggcgaaattttattagttggctgccgaaaatacggcagcacaatgttaactgattagataagacaaaatagacatatatttaatggttaggcctctggcatggccgaagagtgatgtgttgatattttccactcattgccgtcccaggcataagtaaaggtataacgtgctgaaaccgttgatttatcggaaaaggtaaaggtataggtgccagtatcaacggctttattgcagccaatacgtatggttcggctatcaattttgccaacgggttttttctccaggaaatgctcaaaataatcgatacgttctgcgtctgtcaggcgtaccttattcgaaaccgtgggcagtaataccgcatcgcttaagtaattacctgccactttcttagcatctccggtctgcaaagagtcattccatttatcaaataaccgttcaatttgtaccgattcaaccttagtgcaattgggagccgttgtagccaaagcggaaccagaaatcagcagcagtgagccgaataagccaagtgattttttcatatttattcctttcttcagttagtttttcctcctgtcagaagtaacagtaataacctgagtaaacaacatggttttaatatagttacatttatttactataatttaggtaactatgtaattttatatattgaagtgaaataacatactgattaatttacagggtatgagtaaaaaaacaggaataaaaaacctaattatttttatttccgcccataaaactctattgacatcgagttttatggttcattatcaatatatttttgattgccatgctagaattcaatttggttcggttaatcaattgagttgcagattaatcatcatgataattaatgattattttatttgttatactcagcatttatagaatggaatatatatctttattgggcaggctaatttgatgaggggggtattttagaataagacttgattgatttcttatatcgctatcctgtttttgcactctctacaaccgagttacctagaaattatgaaaaaagtcattattgctactattttgatgctgttttcattcagtgcattggatcaggatgcggatgtcaataattcaggcgatgtattatctacatcaacaacggcggagataatcaagaaagactgttctggaaaaacgctaaagccgtggccagttttgcttgaccacgacaagggagacctatgacgatgacggaagcgcttgtctaagctaaaactgtgatgattgataaggtggtgtgggagtagataaaataatgcggtgagtatcgggagcatggatattcaagctgttgggaattgttgtcgatttgtgtatcttcttacttggttaactcgcagcgtagttcaaggatgatttatatgagttttaaaaatttctctgttttaatggtgttgtatttcagttttattttctctctgaacgctggtacgaatatcagccatgattggcactatgttcctccggaacccgcttcttctttggcaaagagcgatcgatcgtcgctagatgaagcgctggataatcaaaagaatagaaaagcgctgaagtgggagcttaaagagcgatatcgaacgtattccgagcagaaaatcgatcgggtaacaggagaagtggcagaggaaaaacaagggatagtgtttgaataaatttattgagatgagattggctcaaaatttcacgatgaattttatcttatctaactataaattataggtttttttctgatctacggtgttttggcaaccgttcgcaagtttttagctgtgaatactatttacagaggggttcatgactttgagagcctacgataagtcttaaagtaacccttgtttattgtacgtatatgttttgccacatatactgcctgtcgctaaccgccattagctcattatggaagagcgtacgaccatttcagttgtaggttcggggttcgagacctcgatggcggaccaaataaataagcaaactgggtttaagtcgatgacgggtacccctgagatgtccagtttgcttactcagattgatttacggcctatttatggattattaccaacggctgtttaaacagtgctccgaatattcatgcggtcatcgtataatggctattacctcagccttccaagctgatgatgcgggttcgattcccgctgaccgctccagctttaaataccacttcagccgtttaacggctccacgcaatcgagaaacggtaggccgttaaactctgttctgacatcagagcgacatcttctttatcacggtgataatgatcgacggcgatatcgccagtggtattttcaaatgtttttccgagaattcgtacaaatttatcccaaactgaagctcctttcacatcgagattccaggcttcttctacctgattggcagcagacgcagagacccataaaaaatgatttggaaaaactttagttttttttctccattatttttatacctttcggctgtcatttttagtattacaagaatggaggctaaactacgtgggtatgattaaaatcgtaaatccgaacactttattttatgcgctactgtgttcacttatctctctcgcaaaaaacaacctgcacagcctgtttttgatgacgaagtttatttgttatatagagaaaaatagtatgggtgagacgttaaagcggtgcgaaagtgttttttgcgggtgttgttaaatgccttagggatcgaattaaccttttggagtataaagttggtgatgttttctcttcagaacaaaatgagctttggcgtggaatatttcacgtaataccttgcgtaagataatgatggttttagtggaaaaagggctgcttgaaaaacatcatggttccggtatttatataagaaaaaaatcttcagcccaatgttaatacgctaaaaaattttttgagaatgctcagcaggcgagtaaaagttgtaccaataaagtgctctagtttatggtgataaaagccaatgcggatattgcttctcagctgaaagtaaaaacgggcgagcaggtttatcacgcgatattaaaactatcgctccgatcataatccgtcaactggctgtgaaagtgagcgatctccgctgctattttcatcattgaaaataggaatggctttcccatgatcgattatcttaattttctccctccatgccggtttttctgtttttaatctattctcctctgtgtttttaatcctgctttgatggcaggcttagtcatttttaacctgattgcactgattaaaggaaaaacagcttattaaatgggttttgtgcacaaataaagtgcgacgaggtacagggttaatcttttttttgtatttaaattactgatttttaagccaaattataattggcattgtaattgctaaaactatttcatcttgtataccagatgggataccaatcaatgcctatattaactgtagcggaatgggtcagtttttatcataaacagcctgaacggctgaacgcggcgcttcagcacatgagtaaagaatggcatagcgatgataatgcatggatttacttggctaatgagcaggaaattggttcgcaggtcaatcggctgttaaaggaaatcaattccggtggaaaaaaggccagtgatttccccttatttggcgttccctttgcgataaaagataatatcgacgttgcaggtatgcccaccagcgctgcttgtcccgcttttacttatttccccgaggaggacgccaccgtagttacccgcctgaaagccgcaggtgcgatagcgattggaaaaacgaacctcgatcagttcgcgacaggattggtgggaacccgttccccctttggtacggttgctaacgcttttaacgcggactatgtgagcggtggttccagttcaggctctgcctcggtggtagctcgcggtttggtctgtttttcgttaggtaccgatactgctggctctgggcgtattccggctggtttcaacaatatcgtcgggttgaagccgaccaaaggctggctgtctacgcgtggtgtcgtcccggcctgtcggctgaatgactgtgtgtctatttttgctttaagcgtcgaagatgcctattgcattgccgaactggcgggaggttacgatccgctggacgcctattcgcgcagacatccgcaaactgcatccgcttgtttcaacccgattccgcgttttgccgtgccagatagactggagttttttggcgactttcaggcggcagtcgcatttgaccgttcgttgacacgtttaaccgaaatgggggccgagctcgttgcgattgatttctctgcgttccgggcgttggccgaacagctctatcaaggtgcctgggtagcggagcgcacgctggccgttggggcgatttttcatgcgcaaccggaaaccatggatcctcaggtgcgcgctattgtcgccaatggccttaactacagtgcctgcgatgcctggcaggcggaatatactcgtgcggagctggcgttacgcatcaatcaacaattgagtcactttgatgcgctggttgtgccgacgtctcccaccattcgcactctttctgaaatagccgaacagccggtgcgcttcaacgcgcagttcggcacttacactcatttcgctaatctggcggatttaagcgcgctggcgttgccgggatattttcgagccgatggtctccccgccggaatcaccttgatcgccccagcctggcaagatcgggcgctgagtcagtttggcattctctggcaatcagcgctttcgcaaaaagttggtgcgatagggaaagtgctggccgcggctacgccgctagcggccagctgtcaccatgttcgcgtagcggtagtgggggcgcatctgcgcggtcagccgctcaattcacaattaacccgtcgtgcggccacttttgttgcagaaacccataccgccgcagattatcgcctttatgccttagccaatactcagcctgccaagccggggctggtgcgatcccgtcatggccagcggattgcggtggagctttgggatattccgctggcccattttggcgaatttgtggcggagattctgccgcctctggggataggaacccttacgctggaagatggttccacggcgaagggatttatttgcgagcctacggcattgaacgatgccacggatatcactgcctggggcggctggaaagcctggttggcccgtgatcaccgagcctgaggaggctatatgtttaattcggttttaattgccaaccgtggcgaaatagccgttcgcgcgattcggacgctaaaaaatatgggaataaccagcgtggcggtgtattccgatcctgatgctaatgcccagcacgttatcgatgcggatattgccgtggcgttgggtggggacaaagccagcgacagctatctggatatcgacaaaatccttgcggcggccagacaaagtggcgctgaagcgattttccccggatatggctttttgtctgaacgtgccgagtttgctcaggcctgcgaagacgctggcattgtctttatcggccccactgcggaacacattgccagctttggtttgaaacatcgtgctcgcgccttggccgctgcggtcgccatgccgatgacgcccggaacctcattactcgcaaccctgcgggaagcgcaaagggcggctgaggacatcggatatccggtgatgctaaaaaccaccgcagggggcggaggaatcgggctgatgcgctgcgataacgagggggttctggtagaggcgtgggatagcgttaagcgtatggggcagcagtttttcagcgacgatggtgtgtttatcgagcgttttatcgaccgggctcgtcatctggaagtgcaaatttttggcgatggaaaaggcagggtggtggcattgggagagcgggattgctcgctccagcgacggaatcagaaagttgttgaggaaactccggcaccgaatttaccgcaggctacgcgggaagcgttgtatgcctctgccattgccttgggggaatctgttaattatcgcagcgtaggaacggtggagtttatttacgatgcggccagcgatgcgttttattttctggaagtgaatacccggttacaggtagaacatccggtgacagaaagcgtcaccgggctggatttgattgaatgcatgctgaaaatcgcggcgggcgacgcgctggattgggaacgcatggttcagccaccgcgcggcgcatccattgaagtacgtttgtatgccgaagacgcgctgaaaaatttccagcccgcgccaggcgtactgaccgaagtctgtttccccgaaaatgtgcgcgttgatagctgggttagcagcggaagtgaagtcagcgtgttctacgatcccatgatcgccaaaattattgtccacggtcaggatcgccatcaggcgctggagcggctggtaattgccctaaatacgacacgcttgcatggcattccgaccaatctcgattacctgcggcagattatcggtcttgccgaatttaaggctggcgtgatgtggacgcgtctgctggatagcgtggtgtaccaggctcacagtatcgaagtgttggaaccgggtacctggagcagcgtacaggactgtccggggcggttgggttattgggatatcggcgtaccgccttctggcccgatggatgatttcgcttttcgtctggccaatcgtatcgtcgggaaccatccatcatcggcgggaatggaatttactctgcaaggcccaaccctgcgttttcattgtgatgccaccattgccttgaccggagccgactgtccagcagcgcttgatggtcgtgtcgttccctattggcagccgctgatcgtgaaagcagggcaaatcctgacgctggggcgagccactcgcggctgccgtacttatctcgcggtgcgttacggcctggatgtaccggtctatcttggtagtcgctcgacgtttgctctggggcagtttggtggtcacgccggccgtaccctgcgcgtggcggacatactggcgatatctcggcccgatctggcagcctgtaccacccctgcgccgattgcgctgccgcaaataccggagccagccctgatcccgcagtacggcgacttgtgggagattggcgtgctgaacgggcctcacggtgcgccagatttattcaccgccgcatcgatggaaaccttctttgccagcgaatggctggtgcattacaactcaaatcgtttaggggtgcggctggtggggcctaagcccgaatgggcaagagctgacggtggcgaagcagggctacatccgtccaatgtccatgactgccaatatgccattggttcagtgaatttcaccggtgattttccggtgattttgactcaggatggccccagtctgggggggtttgtgtgtccggtgaccattgctaaagccgaactgtggaaagtcgggcaggttaaaccgggcgaccgaatccgttttcgcagggtgacgtttgagcaggcgcagtctctggcgtccgcgcaggacgcggcgttggctgatttacaggccatgtcggcaccagtctcaacgggaaaagtatcacccattattgaaccaatacatacgcgaagtgcagcgatactggcggaattaccggcacacaatcaatgtcctgcggtgatttatcgtcaggcgggcgataactacattttgattgaatacggcgataacttgctagatttggcgatgcgcctgaggatttacctgctgatgcaggcaattacccaaagtgaaataacgggtattgaagagttgtctccgggggtacgttcgctccaggtgcgttacgacagtcagcgtttgacgcaaagccaattaatggcgctgttgctgggtttggaacaaacgttggaagacgtcacttcactaaaagtaccttcccgtatcgtgcatctgcctatggcgtttgaagatagtgccactctggcggccaccgaacgttatcaacaaaccgtgcgggccgaagcgccgtggttgccgaataatgttgatttcattcaacgtatcaatgggttatccagtcgtgagaaagtgaagcaaatcctgttcgcctccagctatctgattctgggattgggagatgtgtatctcggcgccccctgcgccgttcctcttgatcctcgtcatcgtttactcagttccaaatataaccccgcgcgaacctggacggcggaaggcgccgtcggtatcggcgggatgtatatgtgcatctatggcatagattctcccggtggctatcaattggttggtcgtacgctgcctatctggaacaaattcctaaaaaatgagcaatttggtgatgaaccctggctgctgaaattcttcgatcaggtgcgtttctatccggtaacggaagaggaactcaccgcgtttcgccgcgcttttcgcgaggggcgagcgcagatacaaattgaagaggttgaattcgattttgccacttatagccgatttttgatggaaaacgccgacgacattgcggcattccgccagcgtcagcagcaggcattcaacggggaagtggctcactggcaggcacaggaaagcgcagcggtcgaaagcgccatgctggcagaggcagagataaccgaagacccggatggtcatttggttagcgccgacctgaacggcaatatttggaaaattctggtggaaccggggcaatgggtgaagcaaggagagccgttgattgtcgtggaggctatgaagatggagctgatggtcgtctcgccctacgacggcacagtgatgcgaattcactgccagcaagggcgggcagtcgagccgggggatgcgctgctgtggctggatattgccagttgaagatgcgtgttattgccaaaatcggagactccaaatgatgtcgaatgccagaaatcagccacggccggaaggaatagctgaacgggtttaccgcttactgaagcaggaaatcttcgattttcagctattacccggcgatcgttttagcgaaaacgaagtggcggtgcgaatgaatgccagccggacgccggtacgtcaggcgctgtatgcgttggaacaagagggctacgtggacgttcaaccgcgcagtggatggcaaatcaaagcggtggatttcgattatctggaggcgctgtacgacctgcgaattgtgctggagctagaggcggtgaaacggctgtgcgccttatcgtcggccgtttgcccgccgcagttacagcgcttgactgaattctggatcgatgacccacagatgccgaaaggcaaagatgtggcgtctcaggatgaggctttccatatgacgctactggatgcggcgggaaaccctgagatggcgcgggttcatcgggatattaccgacaagattcgtattgtgcgacgtctggattttactcagcgctcgcgcatcagtgcgacttacgccgagcacggtcagattctgctcgctattttaaaccgccaactgcaagaggcgcaaaatctgttacaccgtcacatttccgtcagtcaaaaagaagttcgtcaaatcacgctccacatgctgcatcaggcgcggcaggagaaattgggttaattaaggctctcagcagacttttcaggggtgactgctatgcaacatcgtatctttattaaagcgttggcgttatccgcatcggttatcagtctcgggctggcttttagcgctcacgccgtcgacaccatcaaagtgggaattatgcattccttgtccggcaccatggccatttccgagacgccactgaaagacgtggctttaatgaccattgacgagatcaatgccaaaggcggcgtattgggtaagaaactggagccagtcgtggtggatcccgcctccaactggccgctgttcgcggaaaaagcccgccagttgctggctcaggacaaagtggccgtagtctttggtgcctggacgtcggtgtcacgaaagtcagttctgccggtatttgaagaactgaacggactgctgttctatccggtgcaatacgagggggaggaaatgtcgccaaacgtattctataccggcgcagcgcctaaccaacaggctattcccggggtggaatacatgatgagcgaagacggcggcgcggcaaaacgtttcttcctattgggtaccgactacgtttatccgcgcacaaccaacaaaattctacgcgccttcctgcatgctaaaggcgttcaggacaaagatattgccgaggtgtataccccgtttggctacagcgactatcagaccatagtttcagatatcaaaaaattctccgccggtggcaaaaccgcggttatttcgaccattaacggcgactcgaacgtgcctttttataaagagctggctaatcaagggctgaaggcgacggaggtgccggtggtggccttctcggttggcgaagaggaactgcgaggaattgataccaggcctttggtggggaatttggcggtgtggaactactttgagtcggtggacaatccgatcaataaagcctttgtgtcccaatggaaagcctatgccaaggcgcgtaaattgcccaatgcgagcaccgcagtgactaacgatccgatggaggcgacatacgtaggtatccatatgtgggcgcaggcggtagacaaagcgggcagcaccgatgtggataaagtccgtgcggcaatggcagggcaaaccttcaaggcgccgtcgggctttacgctcaccatggatgccggtaaccatcatctgcataaaccggtcatgatcggtgaaatcgaaagtaacggtcagttcaacgtggtgtggcagacggataaacccgtgcgagctcagccgtggagcccgttcattcccggtaacgataaaaaaccagatacgccggtaaaaacccgcgcccactgattttgtcaccgccaaactcgtccctcccactgtgggagagggttatcctttcagggagaacataaccatgacacctgctcacgtgttccgatgtctatttttggtcatctggctactgccctgttgcgctaaagcgggagacagcgaggattttgcggtggcgaaccgtacccagcaggcgaaattactgcaaagttgggctgcggcaccgcagaaggttcgcattccgttgctgaaggcgttagtacaggaaaaactggtggtcgatcggcatcagcggccctttagcgaaacgggtacggctttgattccacttggtgaagccaaaacgccggtgggggaaacccataaagtccgtctgactaaccgcctacgggtattggcgaggagcgcgctggcaactcatcaactgatcagtgacagcgccaatgacagattgaaagcggcgctagccttacaaaaccacgccgattctgaattattgccgctattgcaacagcgtttgcgtctggaaagcgacggcggtgtgcgcgatgcgctggaggcggcgctggctcggttgcaactcgccagtccggatgccgcaatacgactccatgcggtaactttactgggatattccagcgttccttctgcacaggcatggctggaacctttggctgataagcagtgggaaagcgatccgaaagtgcgtgccgctgccgccgacagcctgacgaaaatacactatcggttgaggctgggagatcttctcggacaggtctttatggggctttcgctcggctccattctactgctggctgcgttgggactggccattacctacggtttgttgggcgtgattaatatggcccacggcgaaatgctcatgctaggagcctactcggcctggctggttcaggggttctttcaacaatttgcgccccactggctggcatattatccgttggtggcgctacccgtggcctttgtgattaccggcggtattggcatggtgttggagcgcaccattattcgtcatttatacggtcgtccactggaaaccctgttagcgacctggggtatcagcctgatattgattcaggctgtacggatgctgttcggcgctcagaacctcgaagtggccaatccggcttggctgtccggcgggattcaggtattgccgaacttggttctgccgctgaaccgactggcggtattggtttttgtcatgctggttttactgttcacctggctgctgctgaacaaaacccgattgggcatgaatgtgcgagcggtgacacagaatcgtgcgatggcggcctgctgtggcgttgccaccggacgaatagatatgctcgcttttgggctaggttcaggcatcgcgggtttgggcggcgtagcgctttcgcagttgggcaacgtcgggccggagctggggcagggctatatcattgactcgtttctggtggtggtgctcggtggcgtggggcaactggcgggtagtgcggtagccgcatttgggctcgggtttttcaataaaattctggaaccgcagattggcgcggtgctcgggaaaatactgattctggtgctgatcattctgtttattcagaagcgtccacaggggctgtttgccgtgaaagggagggttatcgactaatgagacagccaatcatgtccgccattgcccgtaaagcgccgcggagtatcaaattactgggcagtttgatggttttactcatggtggcactgccgttactcgcactgttaccgaatattcacccaatgaatatttctacttataccctgatgctggtgggcaaaattctttgctacgccatagtggcaattgcgctggatttggtttggggttatgcgggattactgtcccttggccacggtattttcttcgctctgggggggtatgccatgggaatgtatctgatgcgacaggcggcgggggaggaattaccggcgtttatgtcctttctttcctgggatcacttgccgtggttttggtggggaactcagcattttgcctgggcgatggcgctgattgttttggtgccgggattactggcattggttttcggattctttgcctttcgctcgaaaatcaaaggcgtttatttctctatcatgactcaggcgctgacctacgcgggcatgttattgttttttcgcaatgagacaggtttcggggggaataacgggttcaccgggtttaccaccttactcggaatgccaatcaccgcaacgggcacccgcattgggttgtttattgccacggtattgctgttggtcggcagtttaggcatcggttttatgctggctcgcagtaagtatggtcgggtattaacggcggtgcgtgatgcagagaatcgcctgatattttgtggttacgatccccgaggtttcaagctgctggtgtggacgctttcggcagtgctatgtggcctggctggtgcgctttacgtgccacaggtgggcatcattaatcctagtgaaatgtcacccactcattccattgaagcggcgatttgggttgccttgggcgggcgcggcacgctgattggcccggttatcggcgcagggttggtcaatggagccaaaagctatttcaccatggcggtacctgagtattggcagttattcctcggttttatctttatcgccgtcacgttgtttttaccgcgcggcgtgatggggttattccgtaaaggagacaaataatgcaacccgacgaaccgctgtttacccgccagcatttggccgatcgctatcgtgagcaaacggacccgattctacagctggaaaatattaacgtcagttttgatggttttaaggccttgaccaatttgtccctcaacattggcgtgggggagttacgctgcgtcattggcccgaacggcgcggggaaaaccacgcttatggatgtgattagcggtcaaaccaagcctcaaagcgggcgtgctttttacgatcagtctaccgatttgacgagtcttgaaccgatagatattgcgcaaaaaggtatcggccgcaaatttcagaaacccacggtgtttgaggcgctgacggtgtttgaaaatctggaaattgcacagaaaagcgataagtcggtgtgggcctgcttgcaggcaaaactcagtggcgaacagcgggataggatcgacgaaatgttaatcacgctgcggctatccagggagcgcatgcaactggctggtttgttatctcatggtcaaaagcagtttctggaaatcggcatgctgttggtgcaagaaccgcatttattgctattggatgaaccggtcgccggaatgacggatgcagaaaccgaatataccgcagagttgtttcgctccctggctgggaagcactcattgatggtggtggaacacgacatgggatttgtggaaaacatcgccgatcatgtcaccgtgctacatcaagggcaggttctggctgaaggttccctgcgagaagttcaggccaatgaacaggttatagatgtttatctggggcgctaaggagcaaatatgttgcaggttaacgaactgaatcagtattacggcggcagtcatattttgcgcggcgtctcttttgaggcacaaatcggtgaagtgacttgcttgctggggcgcaacggcgtgggtaaaagcactctattgaaatgcctgatgggattgctgccggttaaatctggcagtattaactggcaacaacgcaatatcactcagcgcaaacctcaccaacgagttcaggcaggcattgcttatgtgccgcaggggagggaaattttcccacgtttaacggtagaagaaaatctgctaatggggctatctcggttttctgcccgggaggcaaagcaggtacccgaagatatatatcggctgtttccagtgctgaaatccatgcaatatcggcgtggcggcgatctttccggaggtcagcagcaacaactcgccattggtcgagcgctggcctgcaaaccgcagttgctaatattggatgaaccgacggaaggtattcagccttcggtgattaaagaaattggtggggtgattaaacagctttcatctgagggcaatatggctattttactggtggaacagttttatgattttgccgccgaattggcggatagctatctggttatgtcgcggggatcgattgtgcaacagggaataggcagtgaaatggcgcagcagggcgttcgagggctggtagcgatttaaatgtcttcttaattgaatgcgaatatgtgaatcacaaaggattgaatcattcccaatgagggggacggaaagtaaagacagtgaagtatgagttcagtttagttatctgatgagtaaaactatcatttgcaggcaaacctggcgatggtcgatctctaatataatattactgagtttaatttactattctggcgctagtgtccaatgacgcgcgtatctcatactgagaatcaaatacaaacgcagatacaattcaccggtttactggaaatcagattattgtgcgggaaaatgttgttgcgcattgctacaactatgaataccagattacctgataatcatgcgggtgaagtgaggttacccggaaaagttgcagctatacggattgagatgaaattatattagccctagctgaaaatttcttattgatgaatggaggatgaaaatcgagcggaatatgcgttttttttcggctagaatgaattgatattgataatatggttcgttattgcaacgattaagacgaagcgattaacaatttatttacatgtattattaaatgctacagaagccgaacttgcacaaacgaatgtacttctgtaacatttttctttgttatagatatttttttccctggtgttggctaatattgccccctgactacgtactacgtgtagtcaggttttttttatcacccaatcactaagtttcaaattatacagatgcagacgcgatgcgatagctgtactaaagtgtgatccgatactgtacttttggacagaaagaccacatgaaatttaaagggatgcagttagactttgggagaaggagaatgttttttggtgtaaaaaatgatgaaaggataattgagactctacgggattatatcgacagaaagctagccagctacgattcgcccagatatacctacatggtgattgataaaaagaatcccattgatatattcatggtgtcaagttatccaaatgaatgggttgatatctaccgaacccaaaactaccagcatatagatcccgtggttctgacagcgtttaaacgcacctcaccgttttcgtgggatgaaaatattaccatcctctccgacttgaaatcatccaagattttcgctttgtcgaaaaaatataacatagtcaatggatttactttcgtgctgcacgatcacatgaataacttggctatgttgtcgctgattatggaccatagtgatggtaaagagctagaagctcagataatcaatgactcagagcggctgcaaatgtgtctgattaatattcacgaacagatgctgatgcttggacaaagtacggtgcgtactacgaatgggaaacctgcggacatcacgagtaaagccattttctctccgagagaaaatgaggtgcttcactgggctagtatgggtaaaacctatcaggaaattgcgctgattgcgggcattacgccccgaacagttaaacatcacatgggcaatgtggtgaaaaagttaggggtgattaacgcccgccaggccatcaggctgggagttgaactggaattgattaagccagttctgaaataacgggcagcgaaattggccatgctcgtagcgctgagtctggcccctgtaaaaatgcatttatctgcgatgccatcaatgcctgattgtgtaagtccgttgggagattgagtagataaatacgttctttttcgctgacgaatgcttctttaataatctctatctgccagccagagcgtttaagtatggttagcatggcgcggctaactatagtgtaaatacccgtatgaccgtggtgccgggtataattaatcatggcaaggaagagcacatagcttataggatagcggttacctaaaagcaactttgcacgggttttatcaacaaaaaatcggcttgattcgatatagttattgtcaggtaaggtaatatcgtcgaagagagcgttaaaagtatgagttatcatattcggccggttcaactcaataaaacgcacgctgcaaattagctggcttccgtatatgccgagtagataacgagtgtttgggttatcatattcgtcaaactccatgtcgttgctgcattttacagcccactgtaggcgatctttaaaggttttttttctcagtctgtaaagatcctcagaccgcatattcatcagctcttcatagctgacatcgaaaatttctaacatttaatttcctattatttaatacagttgaatttctatatagggtaataaattttatcatcagaaaagccggttgtcgcgatcaggaatagcgctttatctatttcttgcttatcggcacaatcgggtcaatataataatattttttattagcggagccgcagtcgatgaaccatcgaggcgatgcaaaaaaccgcgtgtttacctgtttcaccgttgatttgtcgccatacgggcattaattctgatgtttatttcattgcccaacggcatgatggttacccatatggttaagtttggcatagacaaatagaccaaggttgatatcaccctatttcagaggttatggcaaagctttacgggcagtaccattacgacgtatctgaaatattagatacgattggtttatctcacgtccatcgcaaatacaataacattggtctgcgatgagctaaacgaattttacaaagctagctgcgaataaaattgttactgaaatttgttgctacaatgtatcaaaatttctcctgcgatagggagcggcaccgccaataataaaatattggccggtattatcgctattccacccagacgataatgagagtatatctcaccccatattaaccaaagctataccattagcgcacgccatgcataggataaaggcacgacgaacagtaatgcgggtaagaaattaactacggaaaatatcttgatctgggcaatacgtaatccaacggcgatcattataataccgccacaggctgagaaatcagcgaaggcgatttcatccatatagggcatgatccaaacggcgaggccaaaaagtaagctctgaagcaataattgtgggactgcgataaatatcagtgccattcccaaagagatggcaaaaatcatcgctgtaaagaaatccatcatcgatttgaccaagagtaattggtaattcccgcttaatccctcggttaaagcaccgacaattcccagcccgcttgcacaaaacagcacgatcatcgcggtataactttgcgcaaactcctctgcgggtaagggactacgcgttttgatcactttggaaagtatgcgttgtaaaaactctgcgcactgtttgactccacgttccagactaaacagttcgccaaatgttgtgcccagaatcaatgccagaacaaccgctggcatgtattgcacctttattatcatgacaacgccgatgcaaatagaagagagagcaaaaattgctggtaacccttctcgcaaacgtaatggtacatgtcgtgctaaagcaacgcccagtaagccacctaaaattattgccgcactattaatccagggtcccagcatggtatgacacctcttcattcttatattcggatttattaattctagcggaaataggtgagtaatgtggggattgctgtgctacttcgggatagatagttaattttttatcaaaatttaattatccgttggcgcagaaagcaaaaacataaatagtactaaagtaaacttggttacagccgatatttagaacgcttagttaaaaccgaatagacagttcgtctgtcgagttagaaatttaaggatgaatgtaatatgagcaatgtagacattggaagtaatgagaaaccagaccattcgattaaaaataaccgatttcgtggatacaataaatcttgggaacgtaaatttttgctaatggataagcttggctttcgcgacgataaatacagtggcgatcagactcttgctaaacagttagcctttggagatcgttttacgatcaattttaatgcttgggcgctgctgtttggatcggtatattactttatcaagggaatgtggcagaagggcttaatcattatggctgccggaatactcttttctgcttttgcaattttcctaggttatgagcgacaggcgtaccttattccatcagtggtgacggctttgatggccaatgttgatttctatcgcttaagccggtttaacgaaaagatatggccaaaattccctgctatattcggtaagattaaattttgcctgctggtattggttttttcattagtcattggcgtaatgacggtggtggccagcgaacgagccgagctagaaacatcggcctgctcggttttaactgaaattcttcaatggcagttagatagtaatgcaacctgtaagaaggtaacgatcgatgaggaagtgacggaagggttctatcgcgctcacgccgtgctggataacggtaatgaaatgcttatcacgctggagcagcgtaacaaccagatttatgtggttgtgcctgagcaataagccgtttgatatcagatgaattcactcactcagcgctcagtcagttatctcgctgagtgaggaaccgattagctttccgtcaaaggtcaagctcgtaggttttttccagattagacgactgtatcaaattaattggcatcgtaatcttccctttcctgtctcctacctgaaccaaaaatgttattgcccaatgattcttttagtcaaaatgaccgtatttttagggatcaaataagtttggttctatggcgcaggttttatggctaacactccattgaaatttgctagctgtgtactgtttcttaatctaaatacgttgataaagataaaaatctacatagtactaataccaacccgacagataatcccgtatcccgtatcccgtacccactgtaccagtgccactattatcagcgcgacgaccataagtcagaatccggcagttttgcaacctattacgcaggtgagtttattttccctgctgctagcatattgcagtaatgactcaaatcgaatgttattggatatcatggtatagccagtaatactgataaaactggtaggtaaagataaatcgactcccaacagccttaagacaaaagcgaattttctaagttggggaaataaaagcagtgagataaactgaatgagtagcgagcaggatactgtccagcggttatcagcattaattgagtcatttcttgtggtataaggctgagctcatcagcctccacatcaataattttttcttctaaaaatagaaatataagcacgtacaggtttatcaacaggcaaaaccacactaaatatgtgtatttttcatgaactaattccatttagatacaaaagtatgaagtgattatcgaatagatgaataataacgaaattgacctaacgtgtttttttattttgttggttcggatctttattaataccatggcaagccggaatggttgccaccacgagcaagattatccgatcgttttcgggcacaaggtttttgtaatgaggagatttggtttggcaattcttctatgtaaggggacttattgcataactgtgcgggatagatgtgctttcctttacattcatcagtttatacgcgaaaagataaacgatggtgttgttgggaatgataatttgatgaataatgtgccagataatcttccctgatgagatacgtgtaaatgttacgcattttagtgacccgaattgatttcctcggggatatggtctgcaccacagcattgattcgcgcgcttaaacagcattggccagaagctgaaattcatgtgctggccaataaatataatgccccggtactggatcgtaatccggatgtcgctgcggtacatacctatgtgtacagtaaacaatgtgagcgtaatcagcgcctgggaaaattaaacgctttaatagatcgcttagcgctaatctggcgtttacgtcggttgcgttttaatctggcgattgtccccaatgggggcgtgagtaaaaatagtatccagtttgtccgacagttaaatgttgccgattgtcgttggcatacagctgagagtgaatttgacgatcgggttgcgtcccacgcagctagccggccaatgaagcatgagtcattatctggatttacgctgttacctgagctagcatccattgatatcaatgcgctacggctttatgtctatcctgagccgcagttacaagctcaatggcgaaattggtttggtgataaaaataaacccaggattggattatttatttcaaataagtcggtcgatcgtcgctggagctggcagaaatggcacgatgtaatcattggccttgagtccaaaaccgagctatttattttccacgatcctgcagaaaaaccgacggatgaacaattggctcatttacccgctcgttgcctttctaccccttcggtacccgatatgatagccgccatgagtcaattagatttggtggtttcggcagatagcgcccctattcatttaagtgcagcattacagattccggttgtagcattatttgaaaaccggcctgaaaaatatttacgttggtatccattgggtgtgccgcatattttattgcgagaagggagacaggttgaggatattcaagctcaatcggttattgaagcggttagctgtttattagatagtaaaattccgccattggaagaaagcggctttcattaatctgtcagcaaacttttagccagtaacttcgacgcctcgcataatgcggggcgtttttattggtatcagtgattcctaaaatgagataagcaaaggaaaacctttggactgactaacgacttgtaaggtattaccaatactaacagtgtgattaatagtttgttttttgccagtattcactcttacgcctaagctagaaaggttcaacagtgtcttaaacataaacatggaggagttacgtttgatgcgtttatctacgttggttttagcgatgagtatggcactcgccgggcaggtccaatccgcagaaatagcggtaaaggggcagttaaataaacctcagttggaagatgaagctaatcgggtcggtcaaaatccgttctttagctcgagtaaactacctttccaggcaccgccgtttaatcttattaaggaaagcgactatgcgccggcgattgaatttggaattgccgaacgtttggcagaggttaatgctattgcaaataatcctacactgccaacctttaaaaatacctttatagcgttggagaaatcagggggaactttaacccgagtgatgaacggatttggcgcaatgacatcggccaattcaagtgatgtcctgcaaaaaatagatgaagaaacctcgccaaaactggcggctatggaagatgctatcaagctgaatagcacactgtttaatcgtattaaaacaatatatgaccagcgagataaactcggtctggacgatgaatcgagacgtttggtggaagtgacttacactaacttcattctggcaggcgcgaatctttctgatgcggataaaaccaaacttaaagctttaaatcaggaagcggctggtctgagcactcaatttaccaataaacttttggctgcaaccaaaaacggtgcggtggcagttaaagacaagtctgttttagcggggctgtcagagggggaattagccgcagcggcgcaggctgccggcgaccgtcaactggataaacaatggctattggtattgcaaaataccacccagcagccggtgctaaaaaatcttagcgaccgagatacgcgaaaatcgttgtttgatgcatcgtggaatcgagccgagcagggggatgccaatgacactcgccagatagtatctcgtttggcaaaaatacgggctgaacaggctcaactccttggtttcccgaattatgctgcttggaaattacagaaccaaatggcaaaaacccctgatacggcactgactttcatgcgtgatatcgtaccggctgcgaccgcacgtgccgagagggaagcaaaagatattcaagcggttatcgatcgtcagaacggtggatttaagctggggccagaagattggaaattctatgcggaacaggtgagaaaagaaaaatatgatctggatgaatcacaaataaacccctactttgaactggacaatgtactgaataacggcgtgttttacgcggcgaatcaactgtttggtattagttttaaagaaaggacagatttgccggtttatcatccagacgttcgggtttatgacgttattgataaagacggtcagcctttggcgttgttctacaccgattatttcaagcgtgacaacaaaggtggcggtgcctggatgagcaattttgtcgatcagtcgaaattgttaggtaccaaaccggttatttataatgttgctaacttcacaaaaccggctcctggacagccagcattgctgtcatatgacgatgtcattacgctgttccatgagtttggtcatgccctgcatggcatctttgccgatcagcaatacccaagcctgtctggcaccgcgacggcgcgagatttcgtcgagtttccatcacagttaaacgaacattgggccagcgatccaaaagtgttcgccaactatgccaaacattataaaaccggcgagccaatgccgcaggagttagtcgataagattcagaaagccaaaaaattcaataaaggttatagcatgaccgagctgctttctgcggcattgctggatatgaactggcatatgctaaacgccagtcagctggagcaggatgttgataaatttgagaaaaaatcgttacagcgagataaaattgatctgagttatgtccctccacgttaccgttccagttatttccaacatatctggggtaatggttatgccgcaggttattacgcatatttatggactgaaatgctggccgatgatgcttttgttggtttattagaaagcggtgggctaacgccggaaaatggtcagcgcttgcgtgataaaatcctatctcggggtaacagtcaggatctggaaaaactttatattgattggcgcggccaagctccaagtattgagccaatgttaatcaatcgtggtttgaaggaacccgctaaataagccaatcttgtaaatagctaattggggaatcaacattcttcgttatagccagtgatttatgttcctaccgcggggcagtttgtatcagattgccccgttctatctgtcagtacatttcatccgcatatatcagccgttgcattgaacaatgagatgcggatctcatagctcgaatccgtccattgaatgaacaacctcattaccttaatgtacactcgttttctatttattctctcatatttagttgctaacaaaactactctcacgctaatagtatgtttgtggatgctactttcccctagctatattattttataaattccactttggttaatatatttacctgcatttatgcttatttgaagcgtatggcgttaaatcggggaaattaactaaaggaatacaatctacctccgataagcacctcatattattactctaggggtttgtttttaatgtttaaaaaaatgagaataagtgttggcttatctttgattatttgtgtgtttagccttgcgctgcttggggtgagtggttttagcatgcaggctttaaccaatagtaaaggtgcaacgtttagaattgaccgtattcaaggcgatcaattggtgcctttatatttaatctattctgagttattaaatacccgtatttacgcgcaaaatgccgcattactgttggaagcgaaggcagacgccggggccgatttattgaaggcacaggattatcttaaatcatctgaaaaaaacatggtcgctttaggtaaaattgtgtcattgaccgcagaagggcggcggttacgtaagaatattgatacgacttatgctgattacattaacaatggtatcaaaccaatgatgcaaacattgcgtgatggtaatgtggctgcttattacaatctaggaccgagtgttgttcctaaaagtgaagctttacgcaatagtttgtctgagttcgaaacttttgcaaaaaatctgggcgaaaaagaaatcgagggcgtaaccgcttcttatcgccaaaatatgtggattattggcggggcattgttgttgacgttaggcttaatccttatggccatcagatttgccaaacagattattttttccccgattaatgaagctcgccagctatttggaaagatatcccgaggtgatttatcgagtgttattccgttacagcccgctaccgaaatgggagggttgctaaccgcgttagacgatatgcagcaatcgctgaagggtattgtttcaggagtgagagaatcatccgccgttattactattgggacgcggcagatatccgccggtaatcaggatttctcatccagaacggaagagcaggcggcttcgattgaacaaactgccgccagcatggagcaactgacttcttcggttaaacagaataccgacaacaccagactcgtcacggcgatggcggataatatggcagtgttggcgcgcaaaaatggagaaaatattaccgatatcacggcgaaaatctcagcgattaacgaaagctctgagaaaatctccaatattattggcgtgattgactctatctctttccaaaccaatattctggcgctaaatgccgccgttgaggcggcaagagcgggtgaggcaggtaaaggttttgccgttgttgcctccgaggtgcgtaacctggcgcagcggagtgcagtatcagcaaaagaaataaaagagttaattgaagactcagtcagcaaaatcaaagagggttctgatatggcctcacagtcgggtgacgatatgaaaaccctgctgaatgaggtcgatcaggtgaagagcttgatcgacagtattgcttttgcgtctgacgaacaaagccgtgggattgagcaggtcaatattgcgattgtgcagctggaagaagtcgcccaacaaaatgcagcattggttgaagaagcctccgctgccacgctatcgctcgctgaacaggccgatactttagacgcttcgatgcaggtttttaccttaaccaaagcgcatgaataaccttcgctattagttttatcgaaaaatctgaccgccttatggcggtcatgatcattgaaatcggcgggctgatcagaggggcagttttaatgaatctcaagtagggttccaatatttttttgaaatttatctgtattttttaattgattaacgtcaatgtaaagtctaataatgatttataatatgttgtttatttattatttcatgcttggtatattgttagttcattacttatttccctctatcatgccattttaattcctgccagtaactttaattacataacgcctaaataacttatttaaactaaacttgtcgattgtttcacaattacgttacacgtttatttaaatgctgttcttttcgtttttttaaagtgttagtttatctgcaagttgacaccagggctaagtgggattttattgagtgactgtccgtgagatgttttattgtctgacaatatacgatgggatgaaatgaaacctcgtagccgtttcctatcttatccaggaattctaataatagcaggttaaaatgaaaagaataaatcaggatgtaatttgttctaatagtgaagcaactgaaagcaatgggaccaaaacactttccatgaagttattcggtggtatttcaaacagggatatcaatgcggtacctttggctttattcattgctattgctgccattgtcgttacgtcatcttattctaatcttttgccaaaaaacatgattggcggcctagccattattatgacgcttggctttattctgtctcacattggtcgccggattccagtactgaaagatattggcgggccagctattctgtgtctgatggtaccttcggttctggtctattttggcgtatttcagaccaataccttagataccgtacatctgttgatgaaagaggccaatttactgtacttcgttattgcctgcctggtcgtgggtagtattctggggatgaatcgcgtagtactgattcagggcatgatgcggatgtttattcccttggtagtgggaactctcgctgcggtggcttccggtctgctggttggaaaactgttcggctatagtttctatcacacattcttctttattatcgtaccaattatcggtgggggtattggcgaaggtatattaccgctgtcattagcttactcggcaattttgggtgagtctccagatgtgtatgtggcgcaattggctccagcggcagttgtgggtaatattttcgccattatttgcgccggagtattggccagaataggctctcgtcgtaaagatctgaatggtgagggtatgctgattcgcaatgcagaagacaatgcagtatttacttcacaagaagggccgcaacaagctgacttccaattgatgggcggcgggttgttaatgatttgcgccttctttatcgttggcggattatttgaaaagctggtgcatattccaggccccgttttaatgattctgattgcagttctgtgcaaatactgtcaggtcattccggctaaaatggaactgggtgcgcacagttgctacaagtttgtttcaaccactttggtttggccgttaatgattggtttgggtatgctgtttgttccgctggaaagcgtcgttgcggtattctcgtttggttatatcgtagtgtgcggtgcggtggtgctttccatggcaaccattagcttctttattgctccgtatctgaatatgtatcctgtggaagcatccattgtaaccagttgccatagtggactgggcggtactggcgatgtggctattctttcggcctctaaccgtatgtcattgatgccttttgctcaaatagcgacccggattggcggggcgtcaacggtgattggtgcgacgttattattaggatggattgcctgattgcaggagtgaaaaagccaccggtgctcaatgtaaccggtggtttttgctacataggggttattcgcagtattgctgcaatgccggaagctggtcaggcattaatcggtaaaggtatacggggcgccctgtggcaccgtagagaacgtgaatactcaatactgccgtttctgacaagaagatgagatatttgcgacaggatactcgagatacaccaatagcattggcgagttgttctgtggagaattcgctggtctggttagccacaatccattcgcacacggtacgtaaagtctgactggtcaatcccttaggcagttttttccgctcaccggtattacgactgtctcggcgcaatagtttatctatatctgattgggcatagttatcgcgctgttccagcaggcgatgctgacgtcgataaaccgacagcgcctcttcaaatcgggcaaactggaaaggttttatcaggtaatcgaccacgccgtactgcagggctttctttatggtattgacgtcgctcgcagaggaaataacgataacgtcggtgtgctcgctaaattcccgcagcgtgggtagcaagtctaacccgttatcttgccgcatgaaaacgtctaaaagtaccaaatgaatcggcgtttcggattgcattagcctttctcgcgccgcctgtagcgatgacactaccccgcaacaggtaaatccattgacctgacttaaatagcatttattcagctcggccaccatggcgtcgtcgtccactatcaacacattaatcatgatttaccgcactgattttataagggattttaataaagaactgagtgtgacttcctgcctcagactcgaattcaagtgtaccacccacggcttctaggcttcgttgtaccagtgttaatccaataccgcgtccatttccttttgtcgaaaagccttccttcaggatctgggattggcaatcaaccgtaatgcctggcccattatcactcacttcacaatgcaagatatcgtcgaccagatgaaagctaacgttgatttctttctgcggcatatccgacatggcatctaacgcattttcaatcaaattgccaagaacagttattagtgtggtggtggtttgttcatctgcagtatccggcagacggctatcttcactgaccagcaatgtaatatccatgtcccgcgcccgattaattttcgccaacaggaagcctgcgatcaccggggattttattttaaatagcaaagagccgatctcttcctgataattatcggccgttttaagaatatagtcttctaactgcggatagtgtttcatatgcagcagaccaagaataacatgaagtttattcataaattcatgggtttgtgttcttaatgcgtcggcataattgaccatgccggttaaacgttgcatcaaatggctaatttcagttttatcgcggaaagttgcaatagcgccaatgatatcgccattcaccaccactgggacggtattggccagcagcatactgccgttgaaatctatttcctcatcgcggcgagcaatacccgtggtcagcacctgttgtagattgaggcggtctggccaatatttgctggcattatccaacagaaggttttccaacggaccattttgcttaaacaagcgtttggcttcgtgattgaccagagtgatgcggcaatcagtatcaacggcgataactccttctttgatcgattgcagcatggcatcacgctgttcaaacaaattggatatttcgtagggctcaaaaccaaacataattctttttaaggctttgactaaaaaccaggtgccgaggctgccaacaaatattccgaatagaatcgtccagggaacgctccaaagattttcatgaataactgattggatgttgagcaacgaaatgccgacggcgactacgccaatttgctgatgatttgcatcataaacaggggtgaaaatacgtagggctggcactaaggttccacgattaatcgcgctgctttcttccccaagcaatgcgggttgcagatcgtccccaataaaatgtcgtccgatcattttagtattagggtgcgagtaacgaatgccgtccatatcggtgacgacgataaataatagttcgttgctcttactgacgctttcagcaaagggttgaattttatccttatcctcagtgtgacttaatccattgatcacaataggggataatgcgagagtacgagcaaccgcaaaggatttttctttgagattattctgcgcaatatggctgatttggataaaaaacagcgtgtgtactgccaatagaaccgaaattataaccacagaaaccataagtgttactgaggtgccaagccgcagcggttttttttgcctgcgcgccggttttacaacgtccatgccatgctccagagatatccatcagaaaaacccttctagagttgatagatattttatgaattagttcaaactattagattaataccaacgagaaaaataagctgtgatgcaacacgagataaagcggggatgagaaaaaaggtgaaggatataaaccgcgatctgaccataactagccatcttccgtgacgctctgaatccactgctgtaataaggttaatgatttttcaagattatatcacatgaaatatgtgatgatgaattaatttacttacttaaccgaattattgcttagatatcgtcatttgcattataaaaacagcggcttgtcagttttgggctaaaaagtcaggggcgtgaatacactcagcgtttaattattattacttactcatattcgccagacttaaatttattatatttcattagttttatagtgataaaaatttattaaataaattaggtatgataattattatatagaagtggtatttagctatcatgcgccatgagagctttttgaacaacagagactagatggatgtgtatatggttttccccattaattgtagtgacgctggattactcttaagcaggttttctgagtgtaaaagagtgactgaaaagagtagcaaccaagcagaacccacggcccagcggatagttgttggcgttttgttttatcctcctgttcctgtttacccctgaccgttggcaaaaaagtaccgccgtctgaaacatttcatggaatgactctggctgagaaaccattcatttaaacaagatttagaagaatccaattcataaaaataaattgggtctttacgcttcaccatgatgaaaatctataaggaacccttttctacttaatatctgcaacgtgcccgtaagataaatcacatgaatttttggagcaataatgacttttatgaaaggacgcttagggaaaataaatttaattttacttattggattatctatttggttttatcccacacccgcaacggtagaccctaaagcctgggggttaatggctatatttaccagcaccgtcattggattgattatttctccttatcctttaggtgcgatggcgatattcagtttgacactatcggttgcgaccgggctagttggaattaaagatattctagccggttttggtgagccgattatctggatgattgcctgtgctttctttatttcacgagggtttattaaaaccggttttggcagacgagtgggctatttctttatcagtaaatttggtcacagttcactgggcctggcttacggactggtgctgaccgatctgatattcgctccagccatgccgtcaacgtcggcaagaagtggcggcattgtcacgccgatatttcgctcaatttctgaagcttacggttcgacgccagaaaatggcaccgaacggcaaatcggcgcttttctcattcaatgtgtcttccaatgcaatgcgataacctgcgcgatgtttttgacgtcgatggctgggaatccgatgatcgccaaattagccagcgaaatgggagtcacaatcacatggggaggatgggcgttggccgccagcgtaccagggctaatttctttagtgattatcccattgttactttaccgtttttacccgccggtattaaaaaagacgccggaaatgagagccattgcctgtgagaaattaaaagaaatgggggcgatgagccgccatgaatggattgttttgtgcgtgtttatttgtctggttgctttgtgggttagcggcgctacgctgaatatcgatgccactttaactgcgtttattggattaaccgcgttactgttgaccggaactttaacctgggatgatgtcgtggcagaaaaagaagcctggcatgccatgatctggttctcggtattattaaccttggccagccaactgaataagttagggttgattaaatggtttggtggaatcgcggctacctgggtggatggcatgaattgggttcccatgctgggagtcttattgctggtttactattatatccactattttatggcgagtgcgattgctcatatcagcgcgatgtacgccgtgtttgtttctattgctatctctgcgggcgctccgccaatgttgagcgtactggtctttggtatttttagtaatttatatatggctacaacgcattattccggcgggcctgcgccgatcctctttggctgtaattatgtgccattgagtacctggtggaagattggattcctgctcagtctggccattattcctatttggttgattattggcagtttatggtggaaaaccatcggctactggtaatccgattatggtggaaaaccatcggctactggtaatccgataggttttatacgttcagggccgatattgatcaataaaggccctcaaccagcgaaaaatatggcgcacagggtatcggctactcggttatgtggcccggagcacgatcgccagtcttcaggcaattctggtatccttcattactgaaacggttggcatcaaggttaagggagtattcgcaggggaggcaatgagatgttggcgcggaaggggattccgtcgccatagccggtggagagaaacgggccaaaactgcggccaacatttgatagagtcttttcattcttgttaccctcatgatgatctcggtgaatgataggttagttacgtcctgtaatgataaccattatcaataataatcatagagcatcatttatccaccttcaaaccctaataaggaatcgtaatggaatggaatattgcgcgttcctgatgatgtttcctttctcagttgggacataaaacttaccagagcgccaccgacgtgccgcgtcatcttctggtaaacgttcttttctacggattaaccattcggtttttcacactgtattagcgattaattgacgttatttcagaatgtatccagagatttcatcttcagtcttggagaaaaaaatacccctgaaataaatgtatataaaaggtattccattccaaatgagaattgtattgataatcattactgttatgtataataatgcattcaacatctattaggttggaggtagaaggtgtcaaatacagagaatttaattacaccttcacctgtaggggtaatagcagatatcgcgcagctctttgagcaaacctttgctcatttttctgtaacgtttaaagtgaattccgataatatcccttccaaaagtatgagtttcaatcattggtcaaatgaagataattttccgtcactgatggaaatttatcaaaatgagtattacggcatcaataatataaagccgaatcagaaggcactttattcactatggacacaatggtatttcggtttggttattcctccaatgatgttgttattaatggaatatccgcaggaaattgactccgactgtcgaaactttaaagtggaatttcatgatagtggcaggccagatattatttactatcagctaaaatggaaaggtcagagcgcggaaaatttactagaacgctattatgcactgattaataaccatgttattccaatagctaataaaattgagtcctatcagggtataaacgggagattactgtggaataacatcggatacctgatgtattggtatctgggtgagtttaaaaaacgcatgaaagaagatgtttatcagtctgttattcaaggtctttttatgactatgaccttgccagacggccgcgaaaatccgctttatcgcacggttatactacgtaatgacaccctgcagcgccgtagctgttgccagcgtaataagctaccgggcgtgggtaattgtcatgattgtccgctcgaaataacgctataaaggtattatttattctgaaataacctcttgcttctggccggtggtttttgtagtgactatttaactctctcttagagttgtcgactatatacccagttatcattgcttataataaaaatatcatggaacagtaatctgagcgcatctatatatattataaggatatatcatgtacggagtagcccatactgaaaccccttttttatcggaaagtggtgatataagtgaggtgctttatttggggagctttctaaataaacaaagtgccgataattatcaggaaggagttaataatgtcactgaaagaattaagggcatattaaacgttgttgataaaccctttagcgggatattaccgaatgaattgtcaccgcttatttctggaataaacctggataatccgctgccctcactcgattctgcgctggatgaattacaacagctgtatattaaagatgctgtttattttcatcatcctaaatatgtagcgcatttgaattgccctgtggtgctgccggcggtgtttggggaaagtattattggtgcgattaactcctctttagatacctgggatcagagcgcaggtggtacgctgattgaacagaaagtgctggattggacccgagataaaatagggttaggtgaagagggggatgggattttcaccagcggcggaactcaatcgaacttaatggctatgttactggctcgcgatcatttttgccatcagcgagacccggcccataaaaatcaattgcagggactcccagccgattttcacaaattccgcattttcacatcggcggttagccacttcagcacgcaaaaagcggccgcattattaggcttgggttacaacgcagtggttcctattccatacgacagtgaatttagaatggatactcacgccttggagttaagtatcgaacgctgtctggcacagggaaatatccctttagcggtggtggcgaccacgggaaccactgattttggcagcatcgatcctctacgtcctattgcagcgttagctcagcactatggtctttggctgcatgttgacgcggcctacggttgcggcttactggtttcttcccagcatcggcaactgctcgccggtattgagatggcgaactcggtgaccgtggattaccataaatcctttttccagccggtgagctgtagcgccttctttgttaaggataaacagcatttttcctatttgacctatcacgccgagtatctcaatccgttaagcgcattacaggaaggaacacccaacctggtgaataaaagtatccagaccacgcggcgatttgatgccctaaagatgtggctgacgctgcgtattatgggtgcaaagcaattggggctggcttttgagcgattaatggagaccgcgcaggtcgcttatcaattaatgcagcctaacccgtattttgaactgttgcatcgacccacgttgagcacgctggtattccgttttataccgctggattcccgcagtgatgcagaaatcgatctcaccaatgcatatattcgtaaggcgttattccgagagggaaattcggtcattgccgggaccaaagtcaatggccgtcagtatttaaaatttacctttctgaatccgactacggggattcagcatttaaatgaaattatcgatgccattatgacccacgggcagaactatgcggatcagcatcacgtcgccgcgctaaacaaggaatgattatgtccatgcgaccttatgattttattgccatcggcattggtccttttaatcttggattggcatgtttaacccaaccgctgaacgatgttcatagtttattcatcgatcaaaatccgggttttgactggcatccagggatgatgctggaaagtgcaactctacaaacgccctttatgtcggatctggtgacgttagcgtcgccaacgcacccgttgagctttttaaattacatcaaacagcagggcagaatttattccttctatattcgggaaaatttctttctgatgcgtaaggaatataaccaatattgccaatgggctgccgcgcaattgcctaacctgcgtttcaatactcgggttgaaactctggagtatgatgaggaaaccgcactgtataagctgcgttgtctggatttgcgcaccggcgattattacgaatgtcagtgtaaaaaattggtattaggcactgggccatcgccgtgtattccagaatgctgccaaccttttatcgcgaaaatggtgacttctggcgattatctggataacaaagcggccttgcagaagaaggcctctattaccttgttaggcagcggacagagtgcggcggagattttttacgatctactcagtgatatagatcgctttggttatcaactcaactggctcacacgttccccccgtttcttcccactggaatacaccaagctaacgttggaaatgacatcaccggaatacgtcgattacttttataacctcccggcagaaaagcgcgatgagctgaatctgactcacaaacaattgtacaaaggcattaatagctcgttgatcaatgacattttcgatctgctgtacaccaagcgtttggacggtgtcctaaatgtgaatttgtataccaatagcgaattacagctggtggaggaaaatagtaatggcaaaggactgagtctgtctttattacagcatgaacagaatcagccgttcactttggcgtccgaaagcgtggtattggcgactgggtatcaatatcagccgccgtcgtttattgaaggtattcgccagttaatccgttgggataataaaggccgatacgacgttcagcgcaattacagtattgatcgccgcaacagtatttttgtgcaaaacgtcgagctgcatacccatggttttgttacgccggatttgggaatggcctgctaccgtaattcctgtttaatccgcgaaataaccggagttgaacattatcctattgaagaaagcattgctttccagcgtttcagcgtgccagaacagggagtcacacaatgacgcaggcgacggcgaaaatgaacccactgacgccagtggaaagcggcgatttcacactgcgacctttagatttgatgcaggatattggctggctgagtcattgggtcagtcgcgaatatgcccagtactggggaatgcaaaatcatagcgagtcacaggtattggcgttttatcaggaattactcgaccggaagccgggcagcgtattggttgggatgaaacaccagcagcctgcctttttgctggaacgttatctcgccaaagaagatgtcattgctgaatattatccggcgctgccggacgatgtcggcatgcatattttagtcgctccgccggtaaataaagtggcaggtttcacttggcgtgtatttcaaagcattatggcgtttattttcagcgatccactggtggcgcgtattgtagtggagccggatgtacgaaatgagaaaattcatcgcctgaataaactcgccggttttgtttatcagcaacggttagaaatgcctcacaagacggcatggctggctttttgcaccagagaacaacatcaacttgcgcttcagtctgcgcgtcaactggagcgtcaatgatgatagccaactccgtcgttgccattcagccccacgggttagccgtggcgcatttgcagccgtcactatggcaaaaagtgaatcgtttgcacttgtgtaaagctatttccgagttttcccacgagcgcatattcgctcctgagatattaatgagtcgacaggacggtgagggttaccactcttaccaactggctacgtcagataaccggattcgttacgttttccgcgcccgccggttggcactggatcactggctactggatccttcgtctttgcagaaaaccgttgatgggcagctggccgatttggattcgctgttatttatcattgaatttaaacaggaacttggcattagcgatgcggtgttaccgacttatcttgaggagattaccagtaccttatacagcagtgcgtataaacacagtcgggtgggtattagcgcgtctgaactggtcaacgccaacttccagttattagaacaggaaatgatggaaggtcatccttcctttgtcgccaataatggacgcattggttttaatgggcaggatttccagcagttcagcccggaggccgcttcggacattcatttggtctggctggccgcgcataaaagcaaagcgcattttgccagcatcgaacagctagattatcggcaactgatgctgcaagagttgggcgaggaagcgctggcggaatttgaacaacggctgatcgccaaagatctcaatccgcaggattatctgctgatgccggtgcatccatggcagtggctgagcaaggtgtcttcggtatttgctgcggatattgctaaccaaatgctggtgttcttagggacggggaaagatgtctatcaggctcagcaatcgattcggacttttttcaatcggagcgaaccgttacgatattacgtaaaaatggcgctatctatcctgaatatgggctttatgcgcggattgtcgccttattatatggctaccacgccgggcattaatgaatggctgtttgagctggtggaaaatgatgagacgctgcgctgctacggttttaaaattttacgtgaagtcgccagcgtgggtttccgcaacagttattacgaacaggcggtgaccggggatacgccgtacaaaaaaatggccgcagccttatggcgagaaaacccgctgcaattgattcagtcgggtcagcaggtgatgaccatggcggcattgctgcatctggatcagcagggcaaggcgtttttgcctgagctcattactgcctccggattgtccacagagcaatggatagctcgttatttacaatgttatttatcaccgctattgcactgtttgtatgcctacgatctgatgtttatgccccatggggaaaatatcattctcgtgctggagaacgccgtccctcagcatatctttatgaaagatctggcagaggaaattctggtgatgaatcccgtcgcagatttaccggaaaaggcgcagcgggtcaaagtggatatgccggaggatatgaaaactctgaccattctttccgatgtatttgacggcgtatttcgctatctggcggcgatcctcgatcagcaggggaattattcagaagggcgtttttgggctgcggtggcgaactgcatttgggaatatcaacggcaacatcctgaactggccgggcaatttgcacgttatgaactgtttacacccaaaattaagcgttgttgtctcaatcggttacagttggccaataatcgccaaatgctggatttagccgatccggctcagagtctgaaatttgccgacgatttgatcaacccattagttgcttttggaatacctgccgtctagttataagttacatcaatactactgtgccccggaggcaattttccggggcgttaagtcttggtttagggtcggactagcgcgggtgatagcgaggaataactaagggtttacctgattcaggatcggtaataattcggcaacgtaggccgaatactgcctcaatactttcttcagtcactatggtttctggccatccttcggcaaaaatcttcccttcttttagcatgataagatgagtggcatagcgtagcgcctgattaatgtcgtgcaagaccagcaccagcgttttgccctgctgatgcaattgctgacataaatccagcatttcaatctgatgggcgatatccagataggtagtcggctcatccagtaacacgattggagtatgctgtgccaaagtcatggcaaaccacgcccgctggcgttgcccaccggataattcactgaccatctgttgcgctaatggctccaggttgaccgcctttatagctgcgcgaacgatattatcgtctgcggcagaccattgacgaaaaaaggattggtgggcatagcgaccccgcgaaaccaaatcgaagaccgtcagggcttcggagacgccagcgccttgggaaagtagcgatagctggcgggctaaggctttagctctgaaatgctgaatattttgccgatccagtttgatacagccactttgtggcgataaaccgcgacttaacgcgcgtaatagcgtcgattttccacaaccatttggcccaataattacgctaaaagctccgtttttaatgcctacgctgagtttatcgacgacagtccgcgggccgtagcttaaagacaataattgagtcgttaagcgtggctcatcggtgtggtactgcgttgcggccaatgactccgaggataatagcgtagaagggcagtctaactcgcgtggggacgtcattttattctcctgacttcagcgtacagcaaatacatcaaatagataccgccaacggctgcggtgattacgccgaccggaagccgggaaggcgtgggcagcagcagagtgataatatctgacgccagcagcagtagtgcgcccatcaacgcggtgcacagcagggcaattcctttggagcggagcagatggcgggtaatttgcggcgcagataaagcgataaatgccaccgggccaaccaccaataccgctgcggtagccaaagttattgccagtaacagactcaacaaatgtgtcagaccaatattgacgcccaatgactgggcaactccgctccccagacttagaaagttgagttgacgactgagatacaccaaccccggtgtcactacgcttaacgttaggccgataaggcatacgtcgcgccagtttttctccgccaggctgccgctgagcaatgcggccatctggtttgcctgttccagccgtacttgcgaaatggcgaagttgacgaatgccatgcaaagcgcaccgacggcaatacctgaaataacaatttttcccgaatgagataggttgttaatgctgcctgcatagaccaatgcgacggcgcaacaggcaccgaggaaggcacctacggggacaggaatgacgcccggccagagcaacagggtggccactacgcccgcggaggcaccggcggtaatgccaataatatccgggctgcctaatgcgttacgggtagtggtctggaaaatggcgccagaaattgccaatgcggctccggctcctaatgcgactaaagcgcggggaagccgcaattgcagcaaaataaaatgttcaaattgactgccttgcccggaaaggacattgagcgttttttcccattcaaacccgttagggctcaataccatggcgataagcaggcctaacaatagagtcggtaacatcaatagtagataacgctgtgtagtgggaaccggagccaaaaacacccaagatcccagcgttagcgttttacaggaattagtgggaggcatcggcaaatccttttttacgattggcgaccgcataaagcaatgggccacccacggcggcggtaatcacgccgaccatcacttcgcctggagcaataatcactctggcgatgatatcggcagttaacagtagaattggcccgaccaacaggctgtagggcaacagccaacggaaatcgctgccaatcatggcacgaaccaaatgaggtgcggccagaccgataaaggcgattggacctgccagtgccgttgccgctgcggccagcatggtcgcgccaattaaggccagtagccggatttggaccgtattggcacccagcgcggtggcgatattttcaccgaaaaccatgatgttaagggacggcgcaatagcgagaacgagggctaatccgccgataaaatagggcaccaccggcaacatcgccatcatcgacatacccgacagcgagccaagcacccagaagcgatagttctctaacacggcgggatggagtagtaccacaccttgcacataggcgaacaggcaggcattgatcgccgcaccaatcagtaccagacgggttggattactattaggtttgccgccgcttaacagataaaacagcagggttgccagcgcggcaccgatcaatgcaggccaaaagcgagaaatagcagccagcgcaggaaaaaaggcaaagctgacgatgatagccgatgcacccgcgttgacgcccaataaaccgggatcgccgagtggattacgtagcagtccttgcgtcacggctccggacaacgccagcgccgcgccggccatcagacctattaaggttcgaggcaatcgggcctctatgaccaaatcgtgatagttacggtcatcggcgctgaaatagtgccagaccgcgctgagaggtaagggtttggctcctaacgtcaggctggcaacaatacagagtagggtgagcagcaagagtcccacccagccccaaacgcggcatgctcgctgccgccgatgaatctgctgagtcatggcggagtctccgaaacggtagccaaatggcgcgctttctctgcgaccagcggcataaagcgttgcaatccccaatcgacgcttaaaggcgtgccgtaggacattgccatcacgatggcctgatcggtcattgggatgtagccaccgtggcgcactgccgcaatggcattaaataatggctgctgttctactcgctggcgctcctgctcgctgttgtaccaggtcactagaatatccacatcattcagtcggtcagcattttccagcccaagatttgcggcgaaactgcctcgggacgcggtcaggtttttaatcgagggagccaattgcaagccggttgcagagagtgtatctacgcgaggatcgcccgcgacatatatcgatagattggcattattagccgccgctttaatgtaagcgaagcgcagtctcgctatgcccggtaccgttttgcccgcgtcggccagagtgctttctaattgcagtagtaaatcttgagcctgagcttctttacccaaagtatggccgatcaattcaatctgctggcgggtagacgtcagccagggcaagccgggataggcgaccaccggcgcgaagcgcgacagctgatcgtacaggctttggctaatacccgactgagtggcaataatcacatcgggcttcaggttgattagctgctcgatatccagttcgggatacatgtgcagaattgtcggtagagtttgtccttgctgttccagcgcctgacgaaaccagggcagatagccttgctcgtcgccgccccagcgatgggattcaatgccaatcggaacctgccccagcgccagcacaatatcctccgatccggctcccaaagtcacaatgcgtagcggcggacgctcaatgaccgcagtaccgagagcagtcactacctgccgtgggaagcctttttcacgagccgctgttacgccgtctggcgcagaagcgttatcgcagccggaaagcaaaaaaaccagcgccaacaggccggttaatacagtcactattgtccccgtgcgatgacgggcgaatccataggggcttagggaattatttatcaataacatttgggtcgagagtttttccttagtgttatcacaagcagccacggagccgaaaaacgcgctccgtggtgttggcggtattaacaataatcagaaggtgtaacgcacagtggcatccacattacgcggcttgcccactaggtattggctgtactgaccaatttgcgagtaataatgctgattgaataggttatccagattcaccgtaagcgacagctgcggagtgaactgatagcggctcatcaggctgtaaaccgcaaaactatcctgacccacgcgctgcacgccggtcgggctggttacatcactgtaggtcttgccttgccagttgacaccgccgccgagagtcaggtctttcatcgaccctggcagggtataggtggtgaaaactttcaggactttttgcggcgtgatcggagtgaaagtttgcccgtttggcacttgcacatgatattgggtataaccggcgaacaggttccagttttcagtgactttcccgctgatttccgcttcaaaaccacgggttttagtcccgtctacggcatagtaagggcggctgttatctggcagacgcggcgcggtggtatccgccactggcatgttgtcctgacgaatttcaaacaccgctaacgaataatcaatgctgttgtcgaaggcgacgcctttcattcccacttcgtagttttgcccactgatcgggtccaacagttggttatcacgattgcggcgactttccggattgaagatttcggtgtagctggtataaaccgacaaatcgctgttgatgtcgtaaatcaggccgctgtagggcacgaactgatttttatatttggcattttgcggcgtgccgaagttatcgcctcgggtttcccatgtggttaaacggccaccgagaatcaacgttagcggatcggccagagaaagctgagtcaccgcatattgcgcggtttgatcgttacgccctttagaaccgtaggcgcgagtagtgctccagatcggtttaggatactgccagcccggctgagtaaaatcccccagttcggggcaagtactgcgggtgctgcaattggcgggattgtaatagtcgttatcaaaattctggcgttggtggttccagccaaagccaagctgatgttgacgcccaaacagactgtaatgaccgttaacctgaatatcatagttttgctgacggcgagttccgtcaataagcgacatactccctgggcgcatgccgatattggtcgtacgatccggataaccatctgcccacatcacgttttgcagcagtttgtcattatcaaaagtaaaggtacccttgatgttccagccgttgtcgaactggtgttgcaggctgctaaacaacgactgggttcgggtttcggaagaagtccagtcaggcgcggtgctggccgaacgaccgtaatgagttcggccactgtcgctgtaaaacagcggcaacccgccaaacatgcccccttgggtcatattgcgttgagtatcggcgccgatggtcagcagggtgtctggcgtcagatccacttccagaatgccgtaaaatggattgctgctttgtttgtatcggtcaacgaaagaatgggtatcctgatacgccgtgacaaaacgcccgcggacgctgccatcgctattcagcggaccagaaagatccagcgtagtacgccatttatcccatgagccaacgccggcagaaacgctgccgcgaaaatcctgagtcggacgtttacgtaccagattaatcacagccgatgggtttcccggcccggtcattaaacccgccgcaccacgtaccacttcaatccgatcgaacatatcggtatccagcgtgttatcgccgtaattaaagcgggtatcgtaaaaagtggctacgccgtcgcgcataatattattcacgctcatgccgcgtgaagtaaaaccgaagcgatcgctatcgaactgacgaacgttcaggccggtaatattattgaccgcgctttctacgctggtcaggttttgatcgcgcatacgctgtttcgtcagaatactgaccgactgtggcgtttcgcgagcagaaatattcagaccggtggccgtagacattgaagaggtattataactgccgctgtcttccgttacacctgggtggtttagcggcgaggcaatcacggtcatggtggtttcttcagcgctgtttttcggtgatgacttcgcgctgtcattatgattatcgctggcggcataggcgctccccaatagcgataaattagcggcaagagcccatgccacgggtttaactctgtgtgaaggttgcaggcgaatcgggttcttgccgtcacttcttttcattattcttttcaccaaatatcaggttgtgccactggggtgggcagcgacccacgccgctgccgtcattaattaacctgccgttttaaaggcatgaatcgggtttgctaaggtgccagcaaatttgagattcttctcccgatcgtcgagatcgatcatttgctggttattggccatttgcaggcgattcagacaggtgcgaacaaaatcggctttaaacaggtcgaattggttatatttatcggccagtgccggatgctgagcctgataggcataaatgcagtccgcgactaatttccagaattggcgttcgggcagtcccagatctttttgtagaattggcgtgagataacggaagaaacagtcaaaaatatccaggaaaatataattgatcttcatatcgtcttcgatagtgacatgcagatctttaatctcctcgggcagtgttatatcgccgttaagaatggcaatttcttctccgatatctttcattaacacatgtaccggaacgttattctccagaaccaacatcaggttttccccgtgaggcataaagaccagatcgtaggtgaagaaggcgtgcaataacggagaaagataggcatccagataatgtgcaatccatttatctgcgtctaaaccagaagaatgaactaatgcggccacgaccgaatgaccggtattatcccggtgcaagagagaggccatggtcattaaacgctgatggctggcgagtaaggggattgggctttctcgccatagcgctgaaagcattttcttatgcggattgtctttaatcagcgcggtttcgaaataatcattgaaatagcccattgctgcgcgttcccgcaggagggtaaattttttctgttgaaagaatggatcttgggaaaccaacgttgccagccattcattcactagcggcgtggtggccatactgtgcggggaaagcccgcgcataaagcccatattcagaatcgacagcgccgttttaacgtaattcttttgcggattagcgatattaaaaaatgtgcgaattgactgttgggctaggtagctatcctgcccttggcccagataaacaatgtcattgcgtgctatatcggcggcaaagctagtggcaattctttcgtaccattgccacggatgtaatggcataaagaaatagtcgttagcgttcaggccacgggaggttaactgacggaggaaatcttctgtctggtcattccccagttcttcctgcattaactgctgataactgagaccagttaaactggcaaaaacggttttattttggtgtaccgcaatccagataagtttgatcgaatgagcactttccggcgcaaagtgagcataatctgcaatatcaaacccaatgcgaccattattagcaataaaaaccggatgcccttcgctcatcgctgtttctacactttggtagtctgcctgagttaactgtgtcgaactcagattattatggtgatatttaaatgcgtgaccataaagagtgctggagatctcatctaaatagactggcagcattttttcggaaatacaaagcaggctatttaattcaatgataagttgtaacgcatccagtggctgcggtttaccctccacggttttggttaatgtatcggtttcaatatccagatgatctagttggtaagggtaggcactgaagcgatattctattttgttgtgattggaactaacgctgtcgggacaaaaactatagcgacaaaggccattcgcctgcgtttccagacgggttggtgcgattaatttctcatggctaagttcacgcagtattttcccaactaaatgggtattcgctcgagaccagttctcgccattaagatgttggatatagttatcattgaatttccgcgttgaagccatctctatagtgtccctattgaagagtagaatttcagggaataataagcccagacatacctgagggattgatatccatgctcaaggtgttcctatttgtcatttggctaacgttaagagaaaacgattattattccgttcaaagcgggatatatatagcattataaattttttgatgcaaataattatcatttcgatattgataattgcatttgtcggtttttaactgactatatcattgaatattatgtgttttattttatcaggttgttacgtatcaaactgacttaagaactgttttagcatgtttccagtaaaatctgaccagccgttttccagatatatatccagttaaaatgtcatgatattagttttgcttttccctctaaaataataaggttaatcgacggggaaggaacctgaaaatcagaatttaatgaattcaagatggatttattattggtttaattttggttttgttatccgcttttattacggcgttctttattcatatgcctatttttcatttattataactttattgcatgataagtggttttgaggcgtaattataattggttaattttaatcctaggtcgacaatgaaatggatacatgtcaccaatattaattcactatgccaatgattatctatgaaatgattatatatacatctatttttataaaaataattcaataattattacaatataactccatgttttaattaaatttttaaattttttccataaagggataaaaataaattccaatattcttgcgttttataataaccgtctataattaattttgtataactacttaggcagttatcaatcatctttttatatttttttagtcatactgctgcatgatcgcggcagctggaagcctgtgtctttaatttattattagattaattcattggctatattcggttaaattgcacttaagccaaattacttggaactttatctatgaaagcaagtagtaataaaactgtcgatcagtttgatgctgctgtagcgcgtaatggctataatgcggtaaatgagttattacagtatcacgcgcgtggtgatgacctgataagaaatggcaaaccgtcttactctactgaagacgcggggttacagattacccgtaccgggcaaacctggaatggtaaaaatgtttttgatcagccagtaaagctgacctattcatttttaaacagtgttagcaaaattccgagtggcgataagggttttgtcaaattcaatcctgcgcaaatcgaaacggctaagttgtcattacagtcgtgggcggatgccgccaatattactttcacagaaatcgcgtccagccagaaagccaatattacttttggtaattatacgctttcccacgacggttctccggccgattcccaggcttatgcgtatttaccgggtagcgggagtccgtccggttcgacctggtataactacaatgtcgataatattcgtagcccaaataccatggaatacggccgccagactataactcatgagattggacatgcactggggcttagccatccgggtaattataatgcgggtcaaggttatccgtcttataaggatgtaacctacgcggaagacactcgtcagttcagtattatgagttactggggtgagaaaaataccggtggcgataacaaaggccattacgccgccgcacctcttttagatgatatttccgcggtccaacatttgtacggtgcaaatatgacgacccgcgccggcgatactatttacggtttcaattcaaacaccgatcgtgattattacaccgcgaccgatagcagcaaggcgttgatattctccgtatgggatgccgatggcaacgatactttcgacttctccggctatagcaataatcagcgtattaatctgaacgaaaaatctttctctgacgtgggcgggctgaaaggcaacgtatctattgccgcaggcgtaaccatcgaaaatgccattggcggttccggtaatgatgtcatcgtgggtaatgatgcgcgcaataccttaataggtggcgatggcgacgatgtgttattcggcggcggcggggcggacgtgctgtggggtggcgcgggtaaagatatttttgtctttgctcaagtaagcgactccacaccgaaagctaccgactggatcatggatttcgaaagaggtatcgataagatcgatctttcggcctttaatctgggtaaaagcggtggcctgcattttgtcgataacttcagcggtaaagcaggtgaagccatgctgacttatgacgcaggaagcaacgtaagcgatttagcattaaatatcgctggcgaccggtcattcgcagatttcctagtgaagattgttgggcaaccggctcaggcgacagattttattgtttgatagcttagattcttgaaataaaaacaacgtctaatgatttttattagacgttgttaatgacttaaatcagaaactccggaataagctaataggatttttctgggaaaataacgcgtaaatttaatggttgtaattaggatttatcttttttaaattcatgctgattattattacttgtttttaataacgtaaaacatataatcaaaacgcattttgatgattaaacaaattatctttatgtattaattagtctgaaaataattgtatatatgaagtatgtttttatgtaatgccactacaaaggagatgacatggatttgcattttttacacgggtaaatcttacccgttaatgagtgtagatagtcgccgtggtggtgagtttatttaattacaaggaacttaacgttgaaaacaatcaagaagacatctgacgctcaactcgcctcaaataatcatatggaaggttatagtgatgtaatcaatctattcttagattctgttcgtggcgatggcgttaccactactagcggtaaagcgagttatgctttggataaagccgtattgcagttaaatcgcggtggattaagttggaatggtaaaatgaatttagggcaggatgccgatcttaaatattcatttttagaccacaattccaaaattcctactgggattaacggattcattaaatttaatccggagcaggtaattcaaactaaacttgcactccaatcctggtctgatgttgctaatgtccatttcactgaagtcggtccaacggagaaagccaatattacattgggcaactattcgttaacctctactggccagttagcgggcggtcaggcatttaccagcaccagttattacagtgatggcaaaattgcaaacgcgggtacctggtataattacaacgtggataatattcgcgagccaggctcaatggaatatggtcgcttaacattggcacatgaattaggccatgctctggggctgagccatccagcggattataacgcgggtcaaggcaatacctttaaagctgatgcggtttacggcgaagatactcgtcagttcagtattatgagttattgggatgaaactcaatctggagcggatcatcaagggcactacggattaacgccattggtggacgatattgcagcaattcaacgtttgtacggggctaatatgagcacgcgtactgaagataatacttacggttttaactccaatactcatcgtgactctttcactttggcggatagcagcgatcagaaagtgttctccgtttgggatgcgggtggcaacgacacctttgatttctcaggctatagcgttgatcaacgcattaatctggaagcgacgtcattctctgacgtaggcggcctgaaagctaacgtttccattgcggcgggtgtcactatcgagaatgcgattggcggttccggtaatgacgtcatcattggtaatgaagccaataatgagttgcgcggcggagcgggtaatgacgtgctgtttggcggcgaaggtgcagataaaatgtggggcggcagcggcagcgatatctttgtttacggtcgcgccacggattcgacactggccaaccctgactggattatggattttgaaggcggtatcgataaaatcgatctgtcgggattccatgttgggacaggtggaattcattttgtcgattacttctccggttctgcgggtgaagcattattaacttacaatcctgacactaatatcagcgatttggctgtgaatatcggtggtgcagaagccattcctgatttcctggtgaaaattgtgggtcagccaatgcaggcgactgactttatcgtctgatagaaaaagtgaaatatagccaatgtctgattgattaaatcaggcgttggctatgaataaaaaattaatggcaggttttgtctgtgttttttatgagaataagataaatctataagttattgactaataatttttaggaatatttttatttattataaagaaaatattttccttaataagatttatgattaaaagatttatcacgtagggtggttttacggcagcggtatagtgattttaattattcattagtggatacccagatcgctaaagcattttgtgttaaaggtgcttgcagccgtacagttcgaaaaatctgtgaacggtgatgcttttgaattgagggtcatgacaaaagcattggttttatctaaccaaactatccggaatatacgtgatgaagcaaagtaaaaataaaataacagagcagggacaacataatgaatatcagttgggaagtttatacgcgcaggggctaatggcgggtgcaactgatcgaataggcacatcgttaaagcagaataaagtgtcgtttacttcggaagaagccgccgatgccattacacgaacaggtcacagttggaatggcatgaaacaaattgatcaatcggcagaggtcaattatttatttttgaaccctaggtatggcgctaaaacgcctgcgggtgactctgggttgacgaaatttaactcagcgcaggtcaccgcggcaaaacaggcaatgcaaagttgggctgacgtagccaatgtgacatttaatgaaaccagcgcggttcatgatgcgaatattcgttttggtaattatgaaatttactccgggcaagactctaaccctagctttaaaaccggatatgcatatttcccttgggggccatcgagtcaggtaggagtatggattaataacaatcatcaagggaatcaacgtccagatttatatcaatcaggtcatcagaccttaagccatgaaataggtcatgcgcttgggttaagccatccagggcgctatgactctctaaaaggtacgccaaattatggtaatgcgggttatgcggaagacagtaggcagtacagcataatgagctactggagtgagtggaatactggcgctgattttaaaggtttctatccagttggccctcaaatagatgatatcgcggcagctcagcgtctttatggcgcaaatatgaacacacgaactgaagatactgtctatggtttcaactcaaatacgaatcgagactctctgagcttaaaccatagcagtgataagaaggtgttcgcagtttgggacgcgggtggtaatgatgcgtttgatttctctggctattcaaacaatcaacggattaacttgaacgaacagtcattttccgatgtcggcggtttggaaaaaaatgtgtccattgcggcgggcgcggtgatcgaaaacgcgattggtggttcagggaatgacattttgatgggtaatcatgtcagtaacatcttaaaaggcaacgccggcaacgatgttatttatggtgcaggtgggggagatcatctgttcggcggcgaaggtcgcgataccttcttttatggcaatatccaggattcaacatcagagaacccggatactatttatgatttcgtcagcggcatagataaaattgacctgagaggtttgaatattgctgaaaatagtgcgcggctggtgaatgagttcagcggtaaagcaggagaagcgatactgagttttgatgagacaaccggaatgaacgaatttgcgttgaatcattcgggcggcggactttcatctgattttaccttgaaaattattggccaaccgatgaaggctgctgattttctcgtttgatagttgataataaaatattgccggcgtctgattgacttaattagacgtcggcgataaaaaagagaatagaaaggctattttatgttttctcattaatttctctggttatggcgctcgagttaacataatgttttctcaattgaaagggatttaattatgaaaaacataaagaatgaaatgagtgaagtgtcttacagcgttgtccacaaaatttgtatcattaataaaagcagtatcgattgtctagatgatgggaatgtcaataataacgcaagtggattatatggcggcaaaatatttaattctcccatgccgagcaaagatatttatgcctacaaggatataaaagatcaatcctgttatcgaattgattttatgtggtatttttaatttttcgtcgatagattggatgtttcaggtatgacatcgctccatggggcgaggttaaatgttgtggatgactttaattgtttatcaacgactggtgatgcaatgctggagtatgattcagctagcgatataacccattttcacatggcgaatgttaataatggcgttatggaagatcattttgaagtttccattattggtaagcttggcttggatacggattttattttctaagtcgatcaacatctggaatagcacatgtacggatattcctatgcgctattaatacaggagcagttatggtgaagcggttattacttcaaccttatcgaacatttttgtgtgccactttggcgttattaacctcaataagttctggagagattatggcaagcagccaggtattacctaaagccagcgatttaagcggtcaatggcaagtacagttaaataaatcagcagaaaaagcctgcagtattgaattgaagtccacggcaataaaacccaatctcacttggcatgccagcggcgatgttgcctgcttagaacaattgctgggcagcgcgccacagggttggcggccaacgccggatggtatcaccctgacggatcaaaccggtggggctgtggcattttttgagcgaacccaagacggttatgaaatgacgctaccggatgatgcgggagtaatgatattacgccgcgtacaggattaattttcgttacggataatctgatgacttcacttttacctaagagtgaagtcagaaaataattatcgcccgccagaaagccgttaaggaaaggttatggtttctcatccaattcgcaattatgaccggttacgagaggcgctgggcgcatgtcgacggagtttttacggcgtcggcattttcagcgccattattaatatactgatgttggcgccctccctgtatatgttgcaggtttatgaccgggttctggcctccggcaatgaaatgacattgctgatgctaacgatcctgatggttggcttatgtttttttatgggcgcgctagagtgggtacgcagtttggtggtaattcgcctcggtacccgattagatttgcgattgaataaacaggtatttaacgccgcttttgaacgtaatttgcgggatggagattctaaagctgggcaggcgctgacggatcttacccaattacgccagtttgttaccggtaatgccctgtttgccttttttgatgcgccatggttccctctgttcctggcggtcgtatttttgctgcatccgtggctcggcatgttggcattaggcggcgctgtctttctgattttcctcacttggctcaaccaatacgtaactcgccgccctctggcagaagcgaataaactatcgatgcaagcgactcatcaggcaaatacccatttacgcaatgcggaagtgatcgaagccatgggaatgttgggaaatatgcgcaatcggtggttgtcccaacactatggatttattcgccagcagaatcttgccagtgaacgttcagctggcgttaatgctttgtcgaaaagttcccgcataatcttgcaatcactgatgctggggctgggggctttgttggcggtgaaaggagatattactgctggaatgatgatcgccggttccattttggtggggcgagtgctgagcccaatcgatcaactgattggcgtgtggaaacaatgggttgcggctcgtcaagcatggcatcggctgcatttgttgctcgataatcacccgcatcgcgaagacgcaatggcgctgcccgcgccgaccggtcatttaagcgtcgagcatatcagtttccgcccgaatcataaccaagcgccgcgtttgcataatatccatttcgctttacaggctggagagactctggggattcttggcgcttctggctcaggtaaatctacgttagcacgcctgttggtggccgtacagccgccgacgcaaggcacgatcaggctggattcggcagatatgaatcagttggataaagaaatttccggggtttatatcggctatcttcctcaggatattcaactgttcagtggcaccttggcggagaatatcgccagatttggcgaaccagacgcagaaaaagtggtcgccgccgctaagctggctggcgttcacgaactgatactttctttgccacagggctatgacacggtgcttggggaaggcggcgcgggcctgtcgggtgggcagcgtcagcgtattgcgctggctcgtgcggtttatggcgatccttgtctgttggtgctggatgaacccaatgccagtctggatatggaaggggatcgcgctttgttaatggcgttggatgccctacaaaagcgcggctgtacgctgattttgatcactcaccgaccggcgttaacggcgcgggctcacaagctgttgattctgaatcaaggacagcagcagcggttcggtcccgcaggggaagtgatggcggagttgcagcagttgaacgcggcaaatcaacctgcattgaaacgcgagccgcaaacggcgggaattccgggttgagtgacaataaaagagaaaccaggcatatgtccgaagacaataaaaaaacggaactggcatttttacgggaagtacaacatagcgagaatcgggcgttgtactggggatgggggctggtcttggccggatttggcggctttatgctatgggcgctgttagcaccgctggataaaggcgttccggttacgggcaccgtggtagtttccggcaatcgtaaggccattcaacatcctgaaggcggtatcgtcgatcgtattatggttcacgatggcgatcgggttgaggccggagaggtcttaatcaccttaaatgctgtgcgggcgcgttctgccagcgatgggctgacgtctcaatatcatcaattattagccaatgaagcgcgtcttttagccgagcaaaaaggcgagtcacagttagttataacgccccgtttgcagcagagccgtgagcaaaaaggtatggtggaaattctggctttgcagcagcaattgctgaacagtcggcagcaggcgttgcaaatggaaactgatgcgctgaacgccaatattgccggattacaggctgcgatgggtgcacaaaagcaggtgaggagtaataaaaacagtcagcggcaggcgttatcccagcagctggacggtttgaaatctttggcagatgaaaactatgtcccgcgaaataaaatgctggaaaccaaacagctttattcacaacttaatggcgaaattgcgcagatcggcggcgaaatcacccgtggagagcgtgaaattcaggaacagggattgagaattaagcagcgccagcaagagtatcaaaaagaagtcaatactcagttggcggaggtgcaatctacattaacggaagtggctagccagttggaaaaggcagatttcgatttagctaatgtccagatgcgctcgccggtggccgggaccgtggtggaaatgaaagtctttaccgaaggtggcgtgattgctgccggtcaatcgctgatggagatcgtgcctgataaccagccgctgtttgtcgatgcgcgagtaccggtggaaatggtggataaaattcaccctgggctgccggtggaactgcaatttaccgcatttaatcagagcactacgccaaaagtagaaggttcggtgaagctgatatctgccgacagagtgttggatgaacgcactcaggaaccttattacagtctgcgggttgaggtcagtgatgcagggcggcaaaaactggatggtttacagattaagcccggaatgccggttcagggttttgttcgcaccggtgaacgttcgttgatcaactatctgtttaaacctctgatggatcgcctacatatggcattaacggaagagtagggagcgcaggatgccattaacgttacgaatcatttttctcaccttattagtattaccggggaggggaaacgcattgggtctgttggatgcgtgggaactggcggtgcgccacgatccgcaatatcaggctgcgggttatgaaagagacgccggtcaggaagaagaggcgttggggctgtcaggactactgcccacggtgcaatacagttatggcgctaacaataactcttccacggtaagccagacggataaccgaagcagcagcaaagtgaagcgcgattatgatagctatgtctcgatgttatctttacgtcagccgctgattgattacggggcgtacgcacgctatcggcaggggatcgcacgtaaactctttgccgatcaacgttttcgcgataaaagtcaggaattgatcgtgcgtttgtatcgcgcttatagcagtgcgctattggcgcaggaaaagaaatctctgctggaggcgcagctacgcgcgtatcaggagcaaattcagttgaatcgccggttgctggctgccggggaaggcactcaaaccgatattgatgaaaccgccgcgcgtttgactctgactcaggtacagctaatcgagcagcaggatgcgctggatagtcagctaaccgagttggaaaatatgattggccgctcggtggatctggcggagttacggccacttacgctggaaactttgccgcaaaatatcagcgatggacggacattggctcaatggcgagatttagccatgcggcataatgcacgcttggctgggcagcggaataacctggatgccaaacactatgaaatagaaagtagccggagtggacatttaccgacgttgcaattagttgcttcatcccggaattcccgctctgaatcggaatataactacaatcagaaatacgatacgcaaagcgtcgggctgcagttaaatgtgcctatttatgctggcggcagcgtatctagcgctacccgacaggcaaccgcgcactatcaacaatctcaggctgaattagatcaggaaacccgacaggtattggcggagttaaagcgtcagttcaatttaagtaatagcggagcagcaaaaatccgagcctggcaaatgacagtggattcggcgcagaaagttttgatagcaacgcgtcgtagcgtgttggggggggaacgaattaatctagacgtgttgctggcggaacagcagttattcaattccaaacgggatctggccgaggccaaatacggttggttgcagtcgtggctagagctacgttataacgccggtactttgcaagagaacgatattttgcaattggcggcctggtttgaaccggaaaagcgctagctgaaccgacagcctgtacaatagggaagcgcggcttcccttttttacgtccctattttcctatacagaaatattttcacaaaggcgtttagccagcacgcaacttgttcaccatattcttgccctcgatttcatccccgtggtttaaccgtaggtttgttagaaaggccgtaagctggatcaatggtgttagaccgtattctggtggataaaactgattttttaacctgaatcaacataatcagcgtctattgtggtgtattattctgccatcccgataggtagggttctccatcgggcttaacgtagtcagttaatatgtcgattgtcagaggagaggcgagatgcactcagcggccgattatataaccttgggtttgattgtgcttatttttggtttttgcctgtacggcttgtttggcgcaccaaagcaaaagtaacgattattcctatttctcgccccacccgttctgcgtggggctattttctttatcggtgtacttttctaccattcgttattatctctatctcgtaagattatatttaaaaatcataatacttcttcattttcgtgcatgtaaatgcccagctttacttgattattgttaggttgagtgaactatcgctagcgtacttttgcaaaaaaagccatagattaaattcgtctaaataacgcatttatactgataaaacgatttatccactgaagtagtaatgaaagggaatgggctatagttaacttattctaatcaaaatggtcttttagccgatgggcaatgtaacggcggaaacgacgggaataaatacaactattcacccttggtggctgcggctaacgcattgggtgaatgcgctggctattattatcatggtcactagcggttggcggatttataacgcctctccactgtttaatttttcttacccggattggatgacgctaggaggatggctaggtggcgcgttgcaatggcatttcgcagcaatgtggcttattttctttaacggcttgttttatttatttatgaatacgataaccggaagatttaaaggaaaattctggccgttaagcctgtctgcactttggcaagatatgcgagcagcgttaaccggtaaactcagccatgccgatttgcgccactataatatggtgcagcgtttcctttatttggtgaccgtgctggctttaattactctggtgctatctggtttagtcttatggaagtccgttcagtttccgttattgcgggaattactcggaggctaccctaccgctcgttatattcatttctttgctatgacctacatcgttttcttcacgctgattcacctgatcatggtgatattggttccccgaacattattagccatgattcgtgggcgctagaggcgaaaaatatgaaacagaaaatcagggttaaccctgcagtggatggtgacgaagtggtaaaagaagtcacgcgaattctggccaaagggttggattcagccagccgcaggcgttttctcaatcaaggattgaccttgggcggtgcgatgctactgaccggctgtgattttgatagcgacgcgcagatcgattcacagttaatgcgaatttctcgtttcaacgatcgggtacaaggctggctgtttaatcccaaaaatctggctccggtctatccggaatctatgattactcgcccgtttccttttaacgcctattactctcaggatcaaatccgtcaggttaatggggaaagtttcaggctcgaaataagcggtctggttgataataaacacccgtggtcattacctgagttatatgcaatggcgcaggttacgcaggttacccggcatatttgtgttgaaggttggagtgctattggcaaatggggcggtattcctttttcccatttcttgcgtctgatcggggctgatttaaacgctaaatacgttggttttaagtgtgcagatgattattacaccagcattgatatgcctacagcattgcacccgcaaactcaactgacattaacttatgatgggaaaatcctgcctgcggaatatggatttccgatgaagctacgtatgcccactaaattaggctacaaaaacccgaaatatattcagtccattttcgttacgaatacttaccccggaggcttttgggaagatcagggttataactggtttggtggcagctagtctgctctcaccctcaccctcagcctctactacttgacctaaaccaaaaaaggaatatgcgatgaaaaagcctattattctaatgctctgtagctgtattgcactgggaatgggagttgcccatgccgaggacactatgagcaacacggcaagtaaagaaatgagtatgaaaaaggatgatatgcataagcaggagatgatgaaaaaggacgatatgcataaacaggaaatgatgaaaaaggatgatatgcataagaaggaaatgatgaaaaaggacgatatgcataagaaggaaatgatgaaaaaggacgatatgcataagcaagaaatgatgaagaaagatagtatgaaaaaacccatgcctgagggtgaaatgaagaaagaaggtagctcttactgatgattaaccggccagagaaggtgtggccggcatcctgtctgtgatttaacgcattaatttgatgggctttttacttgggtaatcagccctaaaaactctcttttcaagaccgcttgagacataagttactcggccaaaaaccgggacgggagaacatcaccagatttccgagtaaaatcaggatcagaccaagtacggcattggcatgccattgataaccttcatagaaggtggagagagtgagcgctacaagtggaaatagcagagtactgtaagcagcagcgctggctccaatacgcccaaccagactgaagtaaagggcaaaagcgatagcggagccaaaaatagccagataaaacaaggcgccaagatagtgagcggagagttccagagtaaaactaccgtgctgtgcccaggcaataacccccatcagtatcgccccgtagctcatagcataggtattggtcgacaggacatccaaaccgcgtcgttgatgacggctgctaatcatatttcccaaagagaagccgtaggtacccagcaggctcaggccaattcctttgagtaattcaggctgtaattgtgtcgccataagatcgtgccagaaaagcgctacaatccccgtcagccctaatatgctggctggaataaagttagggtttaaacgttgccggaaaaatatgagtccgttcactgcattgaacagcaccgccatggagaaaataaccgattccagtccgctgctaatataagccgccgcttgataaaaacagtaaaaattaaaaccgaaaacgcacatcccctgaatgacgcaaaataggtgatcccgtaaggcgatacgtcgtaatcgacggctaaccaataggataatcagcatggtcagagtcgcgatgacaaagcgataaaaaatcgattgggtcaccggcacgctgccctgttgcatagtaatggcaatccaggtcgtaccccaaatcagaactacggcgctgtacaataaagcattcattgaatatctcgttcagaaaatcatgaaagagattatgattctttcgcccaatctgtgctttcagccctttgccagcatttgcataatcttgcgcatttcttaataactacgtagtgaatctctggtttgcatcacggcaactcagtaaactgtgaattctgtcatataaggagttgttgcggtgaaatccgagaattatcaggctttcgataccctgagaggccataaggcgcagctgcaaaattctgtgcggctcgggtctggcattcagttggcagcctggaccaacagtcaggattgcgtcaccctggataatccggatcaccatactctgagtttgtacgtggccgatggctatgagtgttatcacaaaaccgccggtggctggaaaaacggcggtggtccggatcggttttgtattatgccgaaagacagttattccagctgggatgtgcgcactaatctgtctttcgtccatttatattgcacagacgatcatttgcgttctttggccgagcagatttgggaccgaagtccggcgcagctacaggttgacgagcgcgtatttgcggatgatatgcaaattactttgttatatcggcaatttttactcagctgtgattggcaagatcgagccaatcagttgaccttgagcagcgccagtactttattgctgacccatatgttgcgtcattacacccaattgcagtgggcattaccgcaggtgaaaggcggtttggctcccagcgttttaaaacgggttcaggaatatattgaaagccaattgtctcagccattactgctggcggacctggccaaattggcggagcttagtgaatttcattttgcccgaatgtttaagcaaagcaccggattagctcctcatcaatatgtcatgaaagtgagattggagagggcggcttcattactgcgccacggcgatttgccgctgacagaaatagcattagcctgcggtttcagctcggccagtcattttagccaccgttttaaaagtgcctttggctataccgcctctgcgcttcggcaagaatcgcgctgatagtatttagctgatagtatttaaatgcagttaagcttaagccgcgataagttttcttggcgaaagagtttcggccgtcaaaatatgcagagtacgaattttgcccacgatgggcgatagcgttaaaaataagcctatctgacgtcaattgatatacctcaaagtgttcctctcttttcttcagcttattcattgcaacttttttgtggctatgccggaaaccgcatttttgcatgacctttcccgaggccggattacggctgaggtgacggccgtaaataacaaataatcctaagcgttcaaaggcaaattgacacagcgccttagatgcttcgctacatattccttgtccccactattccgtaccgatccagtgccctatttcgccttgattctgatggatatccattagggagatagcacctaacaggcggccattttcaatgtcgctaatagcaaaaacgaccgttttcatttgttcccaggttagcgaatggtcggtaatccattcttcggccagttcgacaggatagtgatgcggaatagtggcggtcatttcgacgatggcggatttcgaagaacaagatagcgggtaatgcagattttctgtctaaagagcggatacactgagtgccacaatgatgatcaataggtgggaaggaaaagtcagtggacaacgaaaaaatcaaacatttgcagggcgttagtgagaaagccagagcggtgatggagcgtgagaagatcgatgctctggtcgtcaccctgtgcgataacttttattacctcaccggttttgccagtttctttatgtataccttccgccataccggtgcggcggtggcggtattatttcgcgatccccacttaccgtcactgatcatcatgaatgaatttgaagccgctggcgtaacttttgatatgcctaatgtggagctgaaaaccttcccggtatgggtagacgtcgacgatccctttaatccagagcaatcgaataaacggcgagagcgcccgattggcccgccggtaacggccgtcttcaatttgttaaaagcggcattgtgtgatgctggcgtattggataaaaaaattgccatcgaattaaatgcgatgtctcacggtggcaaaactgtattggatcgcgttgcgcctggggtgcagtgggtagattctacgccgattttcaatgaaatccgggtgattaaaagtccgtgggaaatagcctatctacgtaaaagcgcagagatcaccgaatatggcattacggaagccagtaaactaattcggcacggctgcacatcatctgagttaaccgcagcctataaagctgccattatgcagcacccagaaaccaacctttcacgctttcatctgatcagcatcggcgagaattttgcacctaagctaatagcagaaaccgccggggcgcagcatagcgatctgattaaatttgattgtggcgtggacgtcgccggatatggcgctgatattgcccgaaccatggtgcttgggcaagctacgccgttggttcagcgaatttacgacagcattcgtcttggacatgaacacatgctgagtatggtcgcgcccggcgtcgcgttaaaagatgtatttgattctacgatggatgttatccggaaatcaggcttgaagcagtacaaccgtggtcatttggggcatggcgacggagtcttcctcggtttggaagaggcgccatttgtcagcacgcaggcgacggaagtgttccagcccggtatggttatgagcctggaaacgccttactacggccacggagtgggcgctatcatgatcgaggatatgatattggtcactgagacaggcattgagttcttgagcaaattgccgcgagaactggtttcccttccgctctgatggtcctggaaatctgagtaagatttcagcatgaaaataagtgatacgaagctggtaggcgatgatggctgccagcatttacggcatcagtcgggtacaggcaggagaagaaaatgcggtatatgaatattattcttaaaagagtctacgatgttcatcctccttatgatcccgatacttttctaatagatcgtctgtggccacgtggaataactaaagttcggctgaacggtgttatctggcttaaagagatcgccccaacgaatgaactgcggaaacagtttcatcaacaaggtgattggccggcttttgtaaaagattacacgatgcaattaaatagcaatgctgttgtatggcgtccgttgcttgaaatagcaaaggagagaccactgactttgctctacggtagcaaagacgcgcagcataatcacgctatcgtattgagaaactatttgcatgcttattgcgaatgatttaatgaaaagagggaggagatataaacagataattcgggtttggaatgaggaggaataaggtttgaatgattgctaccgttgcctacacataatccactctgcctttaattaaaagttgagaaaattcttattctagcgtgatggagataattaggttttttcctagctattgtcattaactcaacaaaatttaatgctatgcggctattgcttgacccttcattgaacatcccccccattagactcaatcaaaaaaatgacatcattgattaatatgaaaaatagaacgctaaccaattcaatagattagccctgaatagggcgggctatggatgataaaagcacgtgtctataaaaaatcaataagcttattggaataaatgaatttccctatcttttaatataaatattcttttccgtaattatatctaggtcaataaactacttatttctaggcgcgttctgctttattttgacatcttgttatgcaacttgttgaattttaagttttttttgttgttttttcaaatcttcattttgtctgcttggcgcgatattttgcgctaaggaattgcgtagatttggactattcagttgtttattgtgctttatgtggcaagaatgcaggtggatggcctttaaatatcggttaagtcaggctattgaccttactttttgaataaattatctttgtaagaaatcgacaggcgtattttctttaagatactataattaacatcttgcaatcttttcatctcagctgaatctcaccttgtttttattgggatacggatgttgctcgatagtgctgttttatcattaaacaaaacgttcgctaaagggttataaaatgagtaaagcgatattaacgctgctgcgtccatttcaaagacccagaatgactttattggcattatttgtttcagggctagcagttaatccagttgtcgcagatacacactatgattcattaattattcaagcaagggatggcaataccacgccaattctagattttctacaaaaagcgtcttctgcaggaatgcttaatagcgggcaggttgccgactggctacaaattgccggttgggcagggcacgataatgacgttattgccatttatcaacgttatcaatccagtatgcaaataccggccagaggattggctgcggtcgcgcgcgcctatcgtaatcaaaaacgttgggatcaggcgttagcactttggcaggccagcctgaaagctgatcctaataacaccgaattgatcagtgcgatgatcatgactcaggctgacgccggtcgtgataaagaggcattgcaaaaagccaccgaattggtgaagagaacgccttctgcccagagctatctggcgctgtcctatttgcacagcgcggccaatcgtcactacgctgcactggaagcggcgaccaaggcgatggattttacaccggtctcccccgaagtgataaagaatcatgttgccatgctgcaaaagaaccgtgtggcggctcccgcattaaaagttgcgcaggaaaatagcaaactattcactccggcgcagatgcggcagcttgaaagagacgcgctggcggaaaaagtacgccaggctagcctgccgacacgcagcgaacaacagcgttttgatctggccgatcaagcgttggaacactatcttgcgctgctgatcgcgtggcagaacaaccccgaaacccagacggactatcaacaggcgcgtattgaccgactgggggcaatgttggctcgcgcgcaaatgacccgtctgattaacgattatgaagcgatgcagcgtgaaggttataccctgccaggctacgcgcagcgctgggcggctagcgcctatatcgaccgtcgtcagccggaaaaagcggcggccattctcagcgacatgtacttcaaagacggcaaaaccgttgcgaagaatatgggactggaagatattgatgccacttattacgcgttgctggagagcgagcaactggataaagctcaggcctttgccaatgcggtgagcaatcaggcaccttatcagctgtttatgtataacctgccggtcagaacaccaaatgatgaatggttggaggggcagtttttgttggcccaatcggaagttaattctgatgaattaccggcggctgaacgtcgtttaaccaagctgaccggtaccgcgccggtcaatatggatctgagaattgcattagccaaagtgtatgccacgcgcggctggccgcgtcgggcagaaagagaactgaagcaagttgaaagcctggagccgagcagtattactcttgaggcggcgcaggctgaaaccgcgctggagttgcaagaatggcggcagtttgaattactgattgacgatctggttgcccgcgtgccggaaaacgtcacaactcaggagctggctcgtcaacgtcagattcgccatatgtcggagctgcgcatttccggcggacgcactttggcatcggatagtccactcagcggtaaaaacgatcagggcattgaggcgctattgtatagcccgcccattgatgaaaactggcgcgtatttaccggcggttcctttgataatagccatttcgaagaaggccgtggcatcaaccgggtgctacgtttaggggccgaatttactgctcgcaataactgggtagaagctgaggtcgccaaccataattatggttatggcaataaggtcggcgggcgcttatccgcttggcatgacttcaatgaccattggcgcatcggaggttctgcggagaaactggcaaaaaacacgccgcttcgtgccttgaaaaataacgttaattcggacagcgcaaacctgtttgtccgttggaatggcagcgatcgtcaggatgcacagctaagcgtgacaccgtcacacttctctgacggtaaccatcgttgggaatacgcgttcaacggtcgccagcgggtgtataccgcgccgtacttgtccgtcgatctgaatctggatttgtccagtagccaaaataccaaagaagacaccttgtattacaacccgaaaagggacttctctgccgtgccgtcgctaactttcgaccacattatgtaccgtcgttataaaaccgtctggagccaacagcttcagctcggagccgggacgtattgggaaaaaaattacggaaccggagccgtaacctccgtgggttatggacagcgcattcagtggaatgacgtagtggataccggtgtttccgtaacctgggataagcgcccgtacgatgggaaacgggaacgtgacgtccagctatcttttgacatgaactatcgcttttaaggaatcctcgccatgccgacattctcattcttaatccggctgctcgtggttgggatagtaacgctggtgcctgcctcttacgcggagtcagatattccagagtttaccccaccggcgatgcggacgttgccgcaaagtgaaaaaccttggaaaaccaatgactttgtggttatcgcctaccacgacgtggaagacgtagctgccgatcagcgctacctcagcgtgcgtagcagcgcattgaacgatcaatttgcctggctgcggaacaataactatgttccggtctccattgagcagattttaaccgcgcgtaatggcggtaaacctttgccgaaaaaggccgttttactgacgtttgatgacggttacagcagcttttacgaaagagtttatccgctgttgatcgcctataactggccggccttattggcaccggttggcacttggttggatacgccgatggataaaaaggtgaactttggcggattaatgactgaccgcaagcgctttgctacctgggatcagatccgcgaaatgtcgcgctctggtttagtcgaaattggtgcgcatacctatgcttctcactatggtgccaacggcaacccgcaagggaataccgaaccggcggcggtgagccgtatttacgatcgtaaaactcaaacctacgaatcggaagccgcttatcgtcaacgcatggaaaaagacgtggcgctgattactgagcggatcaaacaggctacgggaaaatcgccgcgggcttgggtctggccgtatggtgcggcagggggcacggcgctggaaattgtcgccaaccacggttatcaactggccttcacgttggagccgggtattggcaacgtgaataatttaatgagtattccacgcattttgatcagcaataatcctcccatcaaagattttgcgcagtccgtcaatagcgtgcaggaaaaagagatcatgcgcgtggcgcacgttgatctggattatctctacgatcccgatcctgtccagcaagggaaaaatctggataaactgattcagcgcatttatgaccttcggataaataccgtgttcctacaggcattctctgatccaaaaggcgacgggaatattcgtcaggtgtatttccctaaccgttggataccgatgcgtgctgatttgtttaaccgggtttcatggcagctggcctctcgcgctgaggtgcgggtttatgcctggatgccggttctggccttcgaaatggatcctaaactgccgcgcattcaacggataaatattgaaaccgaaaaggttgatgtcgatcccaaggcgtatcatcgcctgacgccgtttaatgcggtcaaccgtcagcgcattattgaagtgtatgaagatttggcgcgttatgcgccgttctcaggcattctattccacgatgacgctctgatgagcgattttgaggatgcttctccggatgcgatggcggcttacaaaaaggccggtttccctgattccattcaggctattcgtcagaacccggaaaccttcaaccgctggactcggtttaagagccagtatttaactgatttcaccaatcagttaatggagcacaccaaagcgattcgtgggccgcagattaaatctgcccgcaatatctacgctatgccgattatcgatccaaaaagtgaagcctggtttgcccaaaacttcgatgagttcctggcgaattatgactgggtagcaccgatggcgatgccgttgatggaaggcgtgccaatgtctaaatctgacgaatggctggcgaatatggtgaaaaccgtggctaaacggccgggggctttggataaaaccgtctttgaattgcaagccttgaactggagaaaagccgaggggcaggatgaaatcagcggcgaagtgttggctgattggatgcgccaattgcagcttaatggcgcgcaaaactttggttactacccggataacttcattaccagcgaaccacagctggagactatccgtcctgcgctctcatcagcctggtacccactcaaatgacagatagaataattgcttttattatcttatgtttagtgttgagtatcccagcgggaatggtattgatgttcaccggggatgttctgctcaacttcgtgtttttctacccgttatttatgtcaggaatctggataaccggaggggtctacttctggctacgtcgtgagcggcattggccgtgggggggcgatgttgaaccaccggaactgaaaggtaatccgctggtttccattcttatcccatgctttaacgagggattgaacgcgcgggagaccattcacgcggcgctggcgcagacctatcagaatatcgaagtgatcgccattaatgatggctccagcgacaacaccggcgaagtgttggatgaactgcaaaaggaagatagccgcctgagggtgctgcatctggctcaaaaccagggtaaagcggttgctctgcaaatgggcacagccgccgcgcgcagtgaatatctggtgtgcatcgatggggatgcgctgctggataaacatgcggtgccgtatttggttgctccgatgattgaaaatccacgggtgggggcagtgacgggaaacccgcgtattcgtacccgttccacattaattgggcgtattcaggtcggggagttttcttccattatcggtctgattaagcgcactcagcgggtgtatgggcaggtattcaccgtttccggcgttgttgcggctttccgccgtagggcgctggccgacgtgggatattggagtccagacatgattaccgaagatatcgatatcagctggaagttacaggtgcggcattgggcagtgttctttgaaccgcgcggcctgtgctggattctgatgccagaaaccttgcggggattgtggaaacaacgtttgcgttgggcgcagggcggtgcagaagtgttcctgaagaatatgttcaagctgtggcgctggcgtaatcgtcggatgtggatactgttcctcgaatattcgctttctattacctgggcctttacctacgccatcagtattctgttgttcttcgttggctttgtggtgccattgccgccgggtattcatgtggagaatatattcccgccggcgtttaccggcatggtgctagcattgacctgtttgctccagttcgccattagtttggtaattgaacgccgttatgagccgaaactgggcatgtcgctgttctggatcatttggtatccgatggtgtactggatgctgagtttatttactacgctggtcgctttcccaaaagtgatgctgaaagtgaaacgtaagcgtgcccggtgggtcagtccggatcgcggtattgggagaatcaaagaatgagtgcgcctctgattcaaaccgagcagcgtttgctgccgaaattgatagatatcatcattaccgcgtttgcctggtgcggttttatctatctgtttgtcaatgggttgcttgccactgtccatcatgccccgcacgcggggacgattccgctgcatatctatctgctggaagggttaagtaccatcgtgatttatttactgattgcgctatttaacgccttggtactgattgcgtgggcgaaatataaccaggttcgttggcgggttgagcgtcgtcagcatcgtcctcatttagaggatcatgaattagccagcaccttatcggttcaggctgaattaattgctgaattaaaaggcggtaataatttcgttctgtataacgatgaggatggacgtttggtggatgtgaaactcggcaaccgtcattaagttaaatattctgagataagcatccctcggccaggctgggggatgctgactttatcctgatgctttatcatcggtgagtggttaggattcttcgttatcatcgccgtaatataaggtgccgatgcggatgatatctcgcccctgcgttttgcggtgtagattggaatcgcgtagggaataaatgcagccacaatattcctgctgatagaatttttcccgcttactgatttcaatcatgcgcgatgaaccgcccatttttcgccagttataatcccaataacgtatccccggatatttatccgccgcacctttgccacagtcatttatttgctgcatatttttccagcgggaaatgcccaatgagctggaaatgacgttaaaaccgtgttcataggcgtatagcgcagtgcgttcaaaacgcatatcgaaacacatggtgcagcgaatgcctcgctcaggttccttctccatccctttggcgcgttcgaaccagttatcgctatcgtaatcggcgtcaataaaaggaatattatgcttctccgcgaagcggatattctcgtctttacggatcaaatattcacgtttgggatgaatattcggattataaaagaagatggtgtactcgatgcctgacgcatttagtgcttccataacttcgccggagcaaggcgcgcagcaggaatggagcagaagtttactctggttatcaggcagcgtgagcttgggacgaataaagtcaggcatatttttaaccgtaaatttaagtagttagccttaagtgtgtcgtattcttttctttgggtaaatcattttacgtttattacaccccatttaggaataaatgcaacagcgagagcggaatcgtttaccgttgatttcatgatcaatagttgacgaataatactgtcacgttcctccttttttctttcgcttatgctagcttggaaccgggaaaaagatggcgagcgttttcaatgtataaagagggatagccgtgagattaaatgagtttggacaagcaattggcgacgaattggcagattggcaaggcgcattgttaccgcaaaaagaagtgctgaacggtcgtttctgttatctggaacccgtcaatatggccaagcatgaaaaacagctgtatcaggcttatcacagtatagaagatgaccgcgattggacttatctcttcaaagcgcgtccggaaacagaggctgagtttcatgactatatgctaagcatgattaacgctaccgatgccgtgcattatgccgtgatggatacgcatggaggccatgtaataggcacagtggctttgatgcgtattgataataacaatggcgtaattgagataggctcggttaattggtctccattactgaaaagaaactctgccggaaccgaagccatatatcttttactcagctacgtgttcgataccttaggttatcgccgttgtgaatggaaatgtgattcctgcaatgagccttctcggaatgcggctaaacgctatggttttaaatacgaaggccaattcagacaggccatagtggtaaaagggcgtaatagagataccgattggttctcgattatcgatggtgaatggccggaggttaaacgagcgataacacaatggttatccacagaaaatttcactgctgacggaaaacaaaagagacgcttacaggattttcaaacggcgatttaagctattcgctgccttgagttattcaggcgattgcgtgttctatgagcagggaggcttatagggttaatgtgtacattggcactattgtcgattgctattatgttggagacaggcaaagggtaaataacggaaaccgaccatgttttaataagaacaaaaaacgtacagcataaataaattatatttttttacacttgcagcacgcgaaatgtgagagtgtcattatactgtaatcatctggcggtaattttcacacggtgtacagcttaggctgttgtttatcactgcgaggatcgctaatggtaaagtccttgtttgggctgttgagacaaaaccaagtatttactacagaaactcgttgtaacgagggccggctcaccgaccctgaattgtcaaccaagatccaaaaccctccctctgattttttatgttcatccctgataagttcctcctgcattaatctgaaccagacaaaacccagtacggtttatcgttcaggttatttgcattttttattggctcttattggctgcaaaggaagccaaaacctaatccgtatgtgaaacataatcgcgcaggcaatgactgctgcggtaggtgaaacaaactgtaaggtgccactatgggaagacaaaaagcagtgatcaaagctcgtcgtgaagcgaaacgcgtgattagacgtgattcacgtagtcatcgtcaacgtgaggaagagaatgtgacatcgttagttcaaatgggcggtgttgaatctatcggtatggcgcgagacagccgcgatacctccgctattttggcacgaaccgaagctcagggtcattacttggaagccatagccagtaaacagctcatctttgccaccggcgaagcgggatgtggtaagacttttattagtgctgccaaagcggcggaagcgctaattcataaagagatagataggattattgttaccagacctgtattgcaggctgatgaagatctgggtttcctgcccggtgatatttccgagaagtttgcgccttatttccgtccggtttatgacattctactacgccgtttaggatcgtcatttatgcaatattgcctgcgcccggaaatcggtaaagttgagattgctccctttgcctatatgcgcggacggacgtttgaaaatgcggtagtgattctggatgaagctcagaacgtaaccgccagtcagatgaaaatgtttctgacccgattgggtgaaaatgtgacggtaatcgttaacggtgatgttacccaatgcgatttaccgcgcggcgtgaaatctggcctcagtgatgcgctggaacgtttctccgaggatgaaatgatcggcattattcgtttcgacaaacaagactgcgtgcgttccgcattgtgccaacgcacattaaatgcctatacctgataatactgtcgcgagatgctaaaacagattgatggacgcggagctattttagaatcgacggtgggataggttggaataaacgctagcgtaattggcagtacaaccgctagccgttcaacaggtaggttgtacgacagactattttaatgttctacaggcctccgatattactatcgggggcctgattttttcaccgctgtcaggtatttttgctaaaaaaatgactcttgtgccgaaatattatcgtcaaacatgagatttgtcgctttgaagcgcaaggattccaaacgataaaatattggccttatttgcatcattcaatttcgctggcgtgaatcctcaggccttattagcactggctacgagagtgaatcagcaaaatctgggcgactctttggttatttaacccaaatggtgttcatgataaaacgcctgggcttaatgctgccttaataaagagtgggaagaggtgagatatggaaataaccactcgtctcattggtgtgtcgtcattaaaaatagggaaaccacgggcaggtctgctattgggtctgatattgttggtgggatgcacctcgcagcagcaaccaccgatggaacagcagagcgaaaaatatcaatatcgggttgggcacgaagtacgttctttggtttctttcgatggagaacagaattatgactgatgtgtgtccaatgggatattggatgccatagaacagcgtttatttggcacagtgcatttattcagttaacagctagtcaggcatcgtcggatataaataaaaagggcaagccataagcttgccctagattatttgtgtcgattcggaattacagcattatggtcatcatataagcggcgaacagtgccaaatgcgccgtgccgtttaacacgttggttctcccgctggagaacgacacctgacaaagcactaatacgctgaccatcaccaccatatggggggcttccagaccaaaggttaattcctgtccggttaataccgcaatcagggtaacggctggaaccgtcagggaaatagtggctaatacggaaccgaagaataggttcattgcccgctgaacctgattagccaatacggctttcaatgcgcccaaaccttctggtgacaggattaataaggcgatcaggaagccggtaaatttggccggcgcattcagttcagtcaataaactttccagcgggttggcgtcaaacttggtgaccgcaataacggcgatcaggtgtaccagcagccagcaggtatgccacaggctactgtgtgatgaaggttttccgtggtgcggatcgctcggatcatcgctttcatcttcgtgttcatagacaaacagactttggtgagtcttggtttgaataaccaggaagacgccgtacatggccgcagaaatcattgctacgactagcgcttgcgcgacgctgaaatttccgtcgggtagggtagaaggcaaaaccagaacaataatggctaatgggaatattgccattaaatattgtttgatgccgactaaattaacgtgctgagtggcaaattttcggccgcccaaaagcagagacacaccgaccagcccaccaatcacaatcataataatggaatataacgtatcccgcattagcgctggggcagcgtcacccgtggccatcatagcggaaattaagctcacctccagtaccacgacggagaggctaagaatcagcgatccgtagggttcaccgaggcgatgagccagcacgtcggcatggcgaaccacgctgaaagcgctgctaagaatggcgaccagagcaatcaggttaatgacaatgatagcggtgaagttgttggtatcgccccagacgttgagaatagccaatgcgataacaggtaaaatcagggaatactcatgatggcgagatttagatcggccaggatcgttttgcgacttcatttgaggtgcgctccttattattttatagctctaaagtggcgttaactccgtttgacgcacataaagcgactatttacaaaaaaaagagactaagattagcaaataacaagggtttggcagagtttctttacacgttttttaaaaaacaatgatatttggttaattagcttattaagaatggacatatcagggcgatatgtccaagtggatataggatttatttcgaaatttaaccgtcgagattatccatcacatcatggcgcttctgatggtaagcctcttcattcatcccttcgcgccagtaagggacggcgtaaagctgttcgcgttcacagcctttttcgcggcgcaaatagcggcgtagtagcaccactaacttgtcttcaccggccagccaaaacatcacattttccgtaggcaaggcgaaagaacagaattgagtgacgatttcatgagttttctcggttcctccgataacccaatttagctcaacgccagctggtttatctaaatccagcacatcatgcgcgctatctacgcgcacgatgacctgaccttgcgcgtgagcaggcaaggtttccaacagagcggcgatagctggcagggaggaagggtcgccaaccagataataatgcagtgctggaggtaacatcggctgtgggccaccgggattgctgatgccgatccagtcatttttctgagcatggcgggcaaaatctaccgccggacctggatgatcgtgcatggcgaattcaatatcaatttcaccggaagcagggcgcaccgcgcgtaccgtatacgtgcgtacaatcggccgcatttccccctccggccagatagggcctttatcggtcaacaccggcaatgcgggttgggtttgtcccggctgaggcaaaaatactttcagatgcgaagcggcgcagtctgctggatagtcagctaatgaatcactgtggaaagtaatacgtcgcaggtgtggtgaaatatccagcacttctttaacttgtatcaaacgaggtggcgtcgggcgtttcgcgggctgattggcggtggtgtctgtagtcactctctcatccttttcattctattggatattcagctaattggggcgcagcggaatagatgaaacaattgtatcactgagttgtgtgaatgataattatttgcatgaaccgaaagtgctatagaacgtgccgtgacgggattattgcgaatgactattaggtttgtaatttatctggctatgtattctgctgcgtcatccgactctggcagcgcagaatattaaatatcaggtactggcagaagaaagggatcaaggcgctatcgattatcagatttaaaagtaggcggcggggaaattcctccgcccgtatttatttaggatttcaatcaaactagatcgtcattatccggagtaaattgaattcgtacttcggtgccgccttctggccgctggcgtatttcacagtgtccgcccagattgttcgcgcgatcttgcataatcatcagcccgtagtggttgggccgtgcgctactgtcgccaatacccaacccattatcctgaaccaccatcaccacctcatcgttatcgcgataaacccgtatggaaacctcggtagcctgagcgtgtttatagatattgctcaaagcttcgcgagcgacctgcaccaaatgaatagactgatgaacaggaaccccatcattaggtaactgataatctagattaaccggaataccgatacgttcgctgaactcggcggcggttgcctctaacgcggcgcttagcgtagcttcgctcagtttaagccggaaggtggttaacaattctcttagctggcgataggcgatatttaactcttcgcgcatttgctgcatcaatatctgactggcttctggcagatccctggtttgctgctgcaggcaacttatctgaattttcaggcaggaaagggattgagcaatagaatcgtggagctcgcgggcaatggccgagcgttcgttcatgagtagtaattgctgttgatgtttagcctgactctcaagcgccagcgtactggtcaactgttctaccaacatgtggatcagctgcaactgttcatcactcaaagggtgattcaccggctgtttagccaataataagccgtattgttccagcttatcgctcaggctccaactcagggattcccactgttgatctggcgtcaaggcgttctccagctcgtgactgctgataatggttccctgggcagtatgcagcgggttggcctgaccttcgcccccatttttatacaggcaaatctgaatgtttttcagcggcgttaataacttcagctgattgattatgggttctaaacgatccgccagcggctggtgggtatgtaattcctggctgctttggtaaagaaaggccagcacctgatttttctgctgtaaatcagcggttttttcagccactcgctgttccaagtcggcataaatcaatgagagttcctgcgacatgcgatttaatgccagaccgagtgtgcccatttcgtcacggtgacgagtcagggaataacgatggctaaaatcccctcgggcaatggcattagccatggtgatcagttgcagccatgggcgaagcaaacggcgacgtagataaaaggttgtggcgagaagcaggatcagggtcagcgcgatgaaaatccattggatgacggataccagaacaatacgctgttccgttttgtgatcgatggcgagtaccagtgcatccaactggtggacgaaattggcaacctgctcagccgcgtcttcggggcgttgagcctgctgtaaacgaggtttaagagtttggatccagtactgatttagtcgctggtactgttcggttaatccttcccgctgtagggattgttgcaggtcagcgctggttttatcctgctccagcgcatcgagatagggtaaatcatggctatccagcggcaccatcgacagcaaacggtagctttgcatgcgtagtgacccggccttattgatagcgtgggcgttaccctgaatactttgagccatccacgaagagatactcatgccggccagtcccagcaggcctaaaaacagcattagcagggcaacctgattaacaatcgggatcaggtagcgtttcattcagcggaattcctttgagcaataaacgccgctaccttaccgtttttgtggataaagtgttagtgctaatggctcttcattcccgcagcggtcatcagcatacggaacagcatggagacggccagtagggctaatacgctgccgcaccaaatcaacaccagccagcccaattttttccaccaaggtgccggtgttgacagccttgtcgaagcgggagccgtttttttaaacataggatttcctgttgttcaaatgaatccgaacgggctgggatcgccagcccggagaaatcagtgatagccctgatcgtgattgatttttccccggaacacgtagtagctccagaaggtataaaccagaatgatcgggataataaacagcgcgccgaccagcataaagccgaggctttgcatgggcgcagcggcggcccagaaagtaatggatggcggaatcagataaggccagacgctgatgcccaaaccgctgtagccgaggaataccagtagcagcgtcagcaggaagggcgcatagtggccgcgatttttgacgctgcgcaacagcgcccaggtggcgaccaacaccagaataggcaccggcaggaaccagtacagattaggcaaactaaaccaacgttcggcaatttgcgggtgcgccaacggcgtccacaggctaatcgcgccgataaccagcagtaggagtaaggtcagcggcgtagccaagcgcagcatggtatcttgtaaatggccttcggttttcatcaccaaccaggtacagcccaacagcgagtaagccacgaccagccccaagccggagaacagagcgaaaggcgtcaaccagtcgaaagaaccgccggtataggcgcggcccgtgacttcaaacccgttgataaaggcgcccagaaccacgccttgggtaaaggtagccagcaatgatccgccaataaacgctttatcccagatatgctgtttttccggcgtagccttaaagcgaaattcgaaggcgacaccacggaaaatcagccctaatagcatcaaggtgagagggatggttagcgcgtccaaaatcaccgcataggccaaggggaatgcgccaaacagcgccgccccgccaagaaccagccaggtttcgttaccatcccaaactggggctacgctgttcatcatcaaatctctatcacggctgtctttcaccaacgggaaaagcatgccgatgcctagatcgaaaccatccatcaccacatacatcatggtgctgaaaacaataataacgaaccagattagtggaagatccatacccataattagctcctgcggctttcagaatggttattgtctaggctgtcactgacggcggacagcggtcgtgccggagtacgctgttggcctgggccgccttgttccggtgaatcaccttcgtgtttgaccgggcctttgcgaatcaggcgcatcatgtaggcgtaacccacgccaaacaccgagcaatacaccagcaggaaggcgagtagcgtgatgctcatatggatttcgccgtggccggaaaccgcatctttagttcgcatcaacccatagactacccaaggctggcgtcccatttcagtggtaaaccatccggccagcaaagcgatcaaaccggacggtcccatccacaggataaaatttaggaaagctcggttttggtataaaccgccgcgccagcgtaaccacagactccacacgccagccacaatcatcaacatccccaatgccaccataatacggaaggcccagaacaccgcgggtacgttagggcgatcttctggcgggaaggatttcagcgcgggcacctgtttatccaggctgtgagtcagaatcaggctacccaaataggggatttccagagcgaaatggtttttttcctgctccatatccggcagaccgaaaagcaccaacggcgttgcctcgccgggatgattctcccaatgtccttcgatagcggcaattttagctggctgatatttcagcgtattcaagccgtgtgcatcgccaatcagcgcctgaatcggcgcgacgatcagcgccatccacatcgccattgacagcattttacgcatggcggaagtatcgcgaccacggagtaaatgccaggcggcagacgccccgacaaagaaggcggaggacaggaaggcggcggtagacatgtgtgccaatcgataagggaatgacgggttaaagatcacttcaatccagtccagcggtaccacctgcccgttcaccacttcaaagccttgcggcgtttgcatccagctattggaggctaaaatccagaaggtggacatcagcgtgcccagcgccaccatgcaggtagcaaaaaagtgcaggccggggccaacgcgattccaaccgaacagcatcacaccaagaaaaccggcttcgaggaagaaggcggttaacacttcataagtcagcaaggggccggtgatactgccggcaaattcggagaaaaagctccaattggtgccgaactggtaggccataaccaaaccggacaccacgcccatgccgaagttaaccgcaaagattttcgaccagaaatggtaaagatcgcggtaatcctgatttttggtttttagccacagtccttccagcaccgccagaaagctggctaaaccgatagtgattgccggaaaaataatgtgaaacgaaacggtgaaagcgaactgaatgcgggccagttctagtgcagttaacccaaacatagggaccccttatcaaacatggtacttccttttatttttcatagcggtatatcgcaataacgcggcaggtgatggttatcgccgtgaaacagatagcgccgaaccggaaaaccctgtccctgtgggagaattattcgaggcaattgctgagatcctaaaccggtcatgcggcgggttcatcaatgcccgaggcggtttttcgggctggcgggcttggcagcaagttaaccacaggttaaagtaggtataatagtgacagttaacgcaatattacctataacagatgaattatgacccgatatgagcaattagccagccagattcgtacccaaattcagtcaaaagtatggcaggccggggataaactgccatcgctacgagaaagttgtaagcaatctgggctgagtctgatgacggtggtgcagtcataccaactgctggaaagtcagggctggatcgtggcgcggccgcagtctggttactatgtggcatctcgacctacccaactaccgcagccgcaacgcggtaccaagctgcatttgtccgagcaggtagatatcaacgcctttatctttgatgtgctacaggcggggaaagattcggcgattatcccatttggttctgctttccccgatcccagtttgttactgcaaccgcggttatccaaagcgctggccagcgtagcgcggaaaatatcgccacaaagctcggtcactaacctgccgccgggtaacgagagcctgcgaaggaatattgcccaacgctacgccgccagcggtatgaatgtttcgccggaagaaattgtgattaccgcgggcgcaatggagtctctgagcctgagtttgcaggcggtgacggagccgggagactgggtcgtgattgaatcgccggcattttatggcgcattacaggccatcgagcgtttgcgattaaaagccattgccattaccactcatccgcagttgggtatcgatctggattctttggagcaggttatcggccaatatccgattaaagcttgctggctgatgactcatttccagaatccgctgggttccaccatgccgtggagccataaacagcggttggtcaacctgttacagcagaataatatctcgctaatagaagatgacgtgtatggcgagctgtattttggtgcggaacgaccactgcccgccaaggcgttggatcagcatcgtcaaattttgcactgttcctccttttccaaatgtctggcacccggttttcgcgtcgggtgggtggctgcgggggctcacgctcagcgtattcagcatttacaactgatgagcaccgtatctgccagtgtgcccactcaactggctattgccgattatctcactcaaggtgggtacgatacgcatctgcgccgcctgcggcgggtgatggaacagcgattgaacaccatgcatcaggcggttgcagaagctttcccgcaaaacgtgaaaatcagtcatcccggcggtggtttctttttatgggtagaaatggaaccgccgtttaataccaatgaactttatctacgcgcgttagagcaggggatcagcattgcgccagggaggatgttcactaccgggaagcagtttgatcactgtttccgcctcaatgcctccttcccatggagcagccacagcgagcaggctattaaaaccctcggccaactggtttatcagctcagtgcgcgtcgttagagagggatattcacagcgcgaacacgcttaactcttttccaaccaaatcgcgggtgagaataatgctcacccatcgacctgctaccagacacaaattcgacagaacaaacgcactaaattgacgcattcaccgcccatatatagggcgttagcatacacgcctgttattattgtgttgcataaatgtgatcgtgcagagcaaaaatagaacttcacattatttgaataatgtttcgcctagcccccggtaattacgccattccttgataaattaatgcacgataaattgcatcttttgcataattatgcattttaaactcttgtttttacgaaaaaaatacattttattcacatattgggcttgctagcataaaagctgctctacactttatatcaagtgaatctgtttcattctgaatagttaacaggatatacgaaaggcgactcaatcgacttcggtagtcgccatttcgcgacataacatgttacctccgccgtactcactccatcaatgtgaggcgacggcggcaaaagagagtgccattggctcgccagtaagcattcacaccccaaactcatgctgagaaagaggtttatatggaacagccaatcccggtcacccgccaatcatttgatgaatggctagtgccaacctatgcgccggctgactttattccggttcgtggcgaaggcgcaaccctgtgggatcaagaaggaaaatcttacatcgattttgccggtggtattgcggtcaatgccttgggacacggacatccggcgcttaaagctgccttgcatgaacaggcggaaaaactgtggcatttgggcaatggttataccaatgaaccggtgctgcggttagccaagcaactgattgacgcgacttttgctgaaaaggtttttttctgtaactccggtgcggaggccaacgaagcggcgctgaagctggcgcgtaagtatgcgttagatacctacgccaacctgccggggcaagtgggcgagaaaaatcagatcgtggctttccgcaacgcgtttcatggccgcacgctattcaccgtttctgctggtggacagccaaaatattcgcaggattttgctccgctgccaggcggtatcagtcatggcatttttaacgatctggcctcggcggaagcgttgatcaatcagcaaacctgcgcggtgattgtcgagccgattcagggggaaggtggcgtggttccggcggacgccgaattcctgcgcggactgcgtgctttatgcgatcgccataacgctttgctgatttttgatgaagttcaaaccggcgtcggccgtaccggcgaactctatgcctatatgcattacggcgtaacgccggacgtattaaccagtgccaaagccttggggggcggcttcccaattgctgccatgctgaccaccaaccgttttgccggtgcgctcaacgttggtagccacggaaccacttacggcggcaacccgctggcctgcgccgtggcgggaaccgtactgcggttgatcaacacacccgaagtgctatccggcgtgaagcagcgtcatcagtggttccagcagggattggcaaacattaacgcccgttatcccgtgttctccgagatccgcggtagcggtttactgattggctgcgtgttaaaacgcgaatatgccggtcaatccaaagccattattcaggccgcggccaaacacgggctgatttcgctgattgccgggccggacgtggtgcggtttgctccttctctcatcatttctcaatcagacgtcgaagagggactggcacgtcttgcccgtgggattgcgcaggtttgccagtaggattaacgccgtaaaaaaggaccttgattatgatgattattcgcccggtagaacgtcgggatctggccgatatcctggaactggctggaaaaactggcgtcggcatgacttctctgccacaaaatgagcaacatctcgcagcacgcattgaacgggcgttaaacacctggcaaggaactttggctccgggcgaacaggggtacctgttcgttttggaagacactgagcgtcaaaaggtggtgggcgtcagcgcgattgaggttgccgttggcatgaacgatccttggtacaactttcgcgtggggacgctggtacatgcgtcgaaaaccctcaatgtctacaagtcggtgccgacgctctttttgagcaacgaccacacgggctacagcgaactgtgtactttatttctcgatcctgaatatcgccagggaaaaaatggtcctttcctttctaaagtgcgctttctgtttattgccgctttccgccagttattctcgcgcaagctgatcgcggaaatgcgtggttttaccgatgaacaggggcgctccccgttttgggaaaacgtcggacgccatttcttttctattgaatttgccaaagcggattatctgagcggcactggtcagaaagcctttattgcggaattgatgccgaaacatccgctttacgtagattttctggcggccgaagcacaggcggttattggccaggtacatcctcatactgcgccagcgcgagcggtgttggaaaccgaaggcctgcaataccaagggtatgtggacatttttgacggtggtccaacgctggaagccaatacggatgaaatccgtgcagtgcgccaaagtaccaaacggcaggtttctattgatgatgtcattctagacggcagcggcaccgcttatctggtagcgaatgatgattatcatcactttcgtgcgctgttgattcacaccgatttgactgacgaggttctgcacctcaacgctgaaagtgcggccgcgcttggcgtggaacagggcggaacggttcgtctggtcagcttattttccccggagacacgaaaatgacccatgctgcactttttattcaaggggaatggcacaccggcaagggtgagcctttcgcaaaacacgatccgatggatcagcaattattgtggcaagcccgtgcagccgatgagcaggatgttgccaaagcttgtcaggcggcgcgagcggctttcccgatttgggcgaaaacgtcgttagcgcagcgagtggaaattattcagcgttttgccgtactgctggaacagcataaacagcaactggcacgcaccatcagtctggaaaccagcaaacctcattgggaaacgctgacagaaattcaggccatgattggcaaggtgaatatttcactgcaagctcatcaagttcgtaccggcaccagcgaatcgccaatggccgacgcgcgctccgtggtgcgccatcgacctcacggtgtactggcagtgtttggcccgtacaattttcccggccacttacccaatgggcatatagtcccggcattgttggcaggtaatacgctggtgtttaaacctagcgaactgacaccgaaaactgcggaagaaactgtcaaactttggcaacaggctggaattccgccgggcgtactgaatctggttcagggcggacgggataccggcatcgcgctagccggacagaatgatatcgatggcgtgctgtttaccggcagcgccgctaccggctatcagttgcatcgtcaactggctggacagccggagaaaatgctggcgttggagatgggcggtaacaatgcgctgattgtcgaacaaattgatgaccgagatgcggcggtgaatttggcgatccagtctgggtttatttctgccggtcagcgctgtacctgctcgcggcggattttggtaaaacgcggtgcagaaggcgatgctttcttgcaacgttttatcgccgtggcgcagtcgctgcggattggccgttgggatcagcagccgcagccgtttatgggcgcggtgatctcccctcaggcggcggagcgtatgatggatgcgcaggaaactctgatcaaactgggcgggaaagccttgctgactatgaccagaccagacgcgcagggcgcggtgctgacaccgggaattattgatatcaccggcgtgaatgacgtgccggatgaggaatattttggccctttggtctgcattattcgttatgacaatttcgatcgagcgttagagattgccaatcagacccgtttcggtctggccgttgggctggtttctccaaatcgtcgccagtttgagcaactgctgcaggaagcacgggccggtatcgtcaactggaataaaccgttgaccggcgcctccagcgctgcgccgttcggtggtgtgggcgcatcgggtaatcatcgccccagtgcgttttacgctgcggattactgcgcctggccgatggcatcgctggaaagcgagagcctgacgttgccagcgactttatcaccgggcatctcgtttgatgtgaccgatcctctataagccgcggcggagaagccctatggcaggatatgaattaaatctcgatggattggtcgggctaactcatcactatgctggattatctttcggcaatgaagcctcgactcagcataaaaatagcctgtccaatccgaagctggcggctaaacaaggcttgttgaaaatgaaaacgctggcggatctgggttacccgcagggcgtgatgccgccgcaggaacggccattcttacccgctttacggcagctagggttcagcggttctgatgggcaggttttgagtcaggtagtgcgggaagcgcccagactcttgtctgcggtaagttcggcttcttctatgtggactgccaatgctgcaactgtctccccatcggcggatagcgccgacggtcgggtgcattttaccgccgccaatttgaacaataaattccatcgggcaatcgaggcggaaacaacgagcgcgctattgcagcgtattttcaatcatcatcgtcactttgttcatcatcaggcgctgccgggaggggaactgtttggtgatgaaggcgctgccaaccataaccgcctcggcggtgattacgatcggccaggggtgcaagtgttcgtctacggtaggcggggtatgacgaccggttctgccccgagtcgttatccggcgcgacaaacgcttgaagccagtcaggccgtggcgcgattgcatcagctggatcccggtcgcacatttttccttcagcaaaatccagaggttatcgatcgcggtgtctttcataacgatgtcatcgcggtcagcaatcaacaggttcttttttaccatcaacaggcttttatggcgggggacagtgctctggaaccattgcgccgccaaatgggcgaaatggagtatcagctagacgccatacaagtgccgacggagcgagtttcggtggctgatgcggtctctacctacctgtttaacagtcagttactgcgtaagaacaacggaaaaatgcttctggtgattccgcaggagtcgcgggatcacgcgggtgtctggcgctatttatccgagttagtggcgagcggcggggcgattgacgaaatcaaggttttcgatctgcgggaaagtatgcgcaacggcggcggcccggcctgtctgcggctgcgggtcgcgctgaacgaaactgaacttaaggcggtgaatcctcgcgtaatgatgacccccgctctttttgccacgctcaatgattgggtcgatcgtcattatcgcgatcgattgcagctcagtgatttggccgatccgcaattactacaggaagggcatcaggcgctggacgaattgacgcggattctggatttgggatcggtgtaccactttcagcaaaactcatttcatggatgataaggagtcttcatgttggatttgttaactctgactttatctgcgcgtcaaccggtgaacgatcaggggagaacggcacagtttcgctggcattggctgggagaaggcatgctggaactgtgcccgttaggcgaatatcaacaggcggtagtgctgtctgccggtattcacggtaatgaaactgcgccgatcgagctgctaaatcaattggttggcgatttgtttcttggacgcctccagttaaatgttcgcttgctgattttattgggaaatcctgcggcgattcgcgtcgcaaagcgttatctcgaacatgatatcaatcggatgtttggcggccgccatcaggactttcctgaatctatcgaaagagagcgagctcagatagtggaacaggccgtttcccaattttttagcactgaaaaggtgcatcagcggctgcattatgatttacacacggcaattcgtggttcctatcatactcgtttcggcttactgccttatcaggggcgtccgtattcatcagagttatatcgctggctacagcatatcgaactggatgccttagtcatgcatacctctgcagggggaaccttttccaattacaccagtgaatactgggaggcagacagttgtacgctagagctggggaaagcgttaccgtttggacagaacgacttggctcaattcgctggaatcaatcgaggattgcaggggctagttagcggcgcacctttgccggaaagggcgccggatgcgccgatgttgttgtatcgcgtggtgaaatctttgatcaaaaccgatgcaaacttctgtttgcacgtggccgacgaaaccctcaattttgcgcgttttgcctacgggcgattgttaatggagcagtccagtggaaattaccgggtcgaacatccttacgaatggctattgtttcccaatccgcacgttgcccaaggactgcgcgcgggcctgatgctggtgcgcatggacgaaacggagctaccgcaacgctaacagcatatgaatttaaggaatataagaaatataagaaatataaggaaaggagagctgtgtgtcaggtggcaatgaataccgattgccacctgacatacagagtgtattaatgaaattagttaatgcattaaatgttaaaattaatcacgcaggttaatatcactttcggacaggcaggttcagcactctgtaatagtaatgtcataataatacctgctagattaaaaccagtgtttaatactgcttaaattctcattattagcataatcatcacatcaaataatgcatgagtggcacgttgttattgatgattttattaactgcttaattaaccatgcgatttataaagttattatttctctcaattaacgctttcctattgggattggctttaggtgaatcattcatttatttttgcattgcttcaaagaacagaaataattttgctgatctgaatgtttacaatagcagggcgcaatagcctcaaatttttcatcatgttgaccatgccgcataaaaaagaaacaaaaagaaacacttgtgcactattttggtgcggtcgcactcttttggatatccgtgtttgcattaaattcattaataatcagtgtattataaaagttcctcaaaacacattttgttacaattaataaactgtttatgacgatatttctgcaatttttccattttatcttttttcgcttaatgctaatgtctcttggctttacatttatttgtcactataaaaaattaaaacttaaccactaggccgctcaaatatatttgatggcgatgagttaaatttatataaaattcaaggaaaataatgatgaaacgcagtgttctggccctggccgtctccttaagcttgatcccatcgctgtctaacgcagctgaaatctataataaagatggtaataaacttgacctgtatggtcgtgtggctgcgaaacatctgttcagcaaagataaaggaagcgacggtgacttcacttacgtccgtttaggttttaaaggcgaaactcaaattaatagccaactgaccggttacggtcagtgggaatataacattcaggctaacaacgctgaatctcaaggtgataaaggcaataaaacccgtctgggctttgccggtctgaaatttgctgaattcggttcattcgattacggtcgtaactacggcgtagtgtatgacacgctggcgtataccgatatgctccctgagttcggcggtgattccatgtccttcaccgacaacaacatgacaggccgttctaccggtttagccacttaccgtaacagcaatttcttcggtctggttgaaggcttgaacgttgccgttcagtaccaaggtaaaaatgacgaaacgctggttggcgcgaacaatggccgtgcaattcagaaagctaacggcgacggttttggtctgtccgttgactatcaggatatcggtggttcaggtatcggcgctgcggcatcttactcttcttccaaccgtactttaggtcaaaaaactctggctaacagcgcaaccggtgataaagctcaggcatgggcaaccgcgttgaaatacgatgctaacaaggtttacatcgctgcgatgtacggtgaaactcgtaatatgacgccatacggcagcgtgatcgcaaccaaaacccaaaacgtggaattggtagcacagtatcagttcgaaaacggcatccgtccttctttgggttacgtacagtctaaaggcaaggatctggttggcgttgctggcggcgatgcggatctgttgaaatatgttgatatcggtgtgacttactacatcaacaaaaacctgtacacctacgttgactaccaaatcaaccagctgaacgatgacaacaaactgggtctgggcaccgacgacgtagtcgcggcagcgttggtttaccgtttctaagttgtcaaagcagtcattattacccttttctgtgtcggaaattggtgaaagttaagaagcgggggcaactccgcttttttattgaaagataaaaaagccacctttgatggggtggctttttttttgtttagcgctcgaagaaatgtttagtgactaccgctttcctgctggcgcccccacagaatcatgctgcctaccagttgtttcagtaatccctgtaatgcctcggctttacctacgttgaattcataaggctcggtttcggacatgtaattgagttgagccagttccaactgcactgcgtgttgttgcaactgcggttgaccataggctcgggtgatatatccacctttaaatctaccattcaatatatgcgtgaaagtcgtttgctgctgacagcaggcaatcaaacgttcgcttaaactgctggcgcagctctgaccgtcgttggttccccagttcagatcaggtagctggccttcaaacaggcgaggaataaccgaagcaatagaatgtgcgtctaacagcagagcatagccaaaccgagcttttagtcgatccagctcttgctgtaactgctggtgataaggctgccaaatagcttcaagatagccttggcgttcgctgtctgagggtatttgttccggttcaaaacaagggcggccatcgaacaaggtctcgggaaacagaccggtagttgccgtggtatacagtggttgatcgtcggatggacggttgagatctatcaccagccgtgaataattgccagccaacagactggcacccatatctttagcaaatgaataaagacgtggaatatgccagtcagtatcagatagcgggcgagccgcatcgctaagcccggcctcaaccgctggcgtcaggcgagttcccgcatggggaatactgattaataaaggtaattcaccggcgtgaaagctgatgggatcggcgatgatcatgggcgaacctctcctcgatagaccacggtggcagggagctgtccgcccagccagtaagataattcggctggacgagataacggccagtgtacccagttggcgagtttgccgacttccagagttccctgtgtttcctgaacgcccagcgcctgcgcgccgtggcaggtcacgccagctagcgcttcttccggcgtcatgcgaaataacgtacaggccatgtttaacatcaggcgtaatgacagcgccggagaggtgccggggttagcgtcgctggctaacgccataggcacgcgatagtgacggaaaagcgctaccggaggacactgggtttctcgcagcatgtaataggctccgggcagcaacaccgcgacagtgcccgatgcggccattgcctgtgcgtcttgctcggtggcgtattccagatgatcggcagacagagcgtgatgccgcgctgccagcgtgctgccacctaatgaggaaagctgctccgcatggagtttgatcggtaaacccgccgtttttgccgcatggaaaactcgctctacctgagtgggtgaaaacgctaaatgttcgcaaaaagcatcaaccgcgtcggccagcccggcttcggcaacctgcggaataatggtattacacaccagatcgatataatcgtcggctcgattagcatattccgacggcagagcgtgggcagccagacaggtggtttttacctcgaccggcagcatttcgccaagccggcgagcgacccgcagcattttcagctcgctttgcaaactcagaccgtagccggatttgatttccagacaggtaacgccttcggccagcagcggtttaatgcgaaacaacgcctgttccagcagttcatcttcgctggtttgtcgggttgcatttaccgtggaaataatcccaccgccttgagcggcgatctcggcataactcacgccgtttaagcgttgttcgaattcgctgctgcggtcgccgccaaaaaccagatgtgtatggcaatcaattaagccgggagtaatgattccgccgggaaaagtcatttcccgcgaggctctcacggcaggcaaagcggcgcgcgtgccaatccagataattttcccatcatgaacggcaatcacaccgtcgctaatagtgtgatagtggccgccgcgcatagtgacgatatcggctccagaccacaagctgtcgcagtaaattacagacgccatctttatcctccgccccgcggggcgatacagttgtatatacaatcaaagacaacctagcctataaatccaaggtcagcaaccggcaacatgcagcaatttgcgctatcacacctttaatttgttatcaggatgttagggttccctgtggtgtaaaacgaccaaatagttgatagcgggaaccggggtacagcagttgagcggaagtgactacggctttgccgaaccaggtacgacggcgaatcaataaacatggctcattttcatttaacgccagtaacttacgttctaccggccccggcatgacggcctcgacaatatgctcgccttcggtcaatggcgcggcctgcgtcagatagctgtagggtgtgatgcggctaaaatcttgctgcatataatcgggagcggtcagcgggttgacgcagcgattttctacctgcaccggaatatcgttctcaaagtgaacaatctgggagtagaacagctgctgtccggccagaatgcccaaggcgattgcttcttcctccgtagcgggacgagcttccagcagtagaattttgctgctgtggcgatgcccgcgcgcggcaatttcatcagcaatattgtgtacggccagcaatgcactgtgtgccttggcttcggccacgaaggtgcccacgccttgcattcgaaccagaaaaccctcactggtgagttcccgtaacgcgcggttgatggtcatgcggctaacgcctaattccgccactaattcactttctgagggaacgcgctgatggggttgccaagcgccagaacggatttgccgaatgatggcctgtttaaccctcagataaataggggcaggagcgtcatccataacgctggtgagttgtaataggcactgttgttcagccacggcgttaacctcgtcaaagaaataataataagataagtctacggttgaatttagcgtatgtatatgtatatacaagtaggcgaattaatttattgacgcgactgtgtctcggcgcgtttgagtgtcatcacaaccttgggattcactatgcctgcatattttgccaaacgcgcttttttacccgacggatgggccacggatgttcgtttggaggtcgacgcacaggggcatatttcgcaaattatcaccggtggacgcgacgctggctgcctgctgctaggcgggccaatcctgcccggtatgcctaatcttcattcccacgcttttcagcgcatgatgtcggggctggctgaaattgccggagatccgcaggatagcttctggacatggcgcgatttaatgtaccgattagtccagcgtctgacccctgagcaggtcggtattattgcccgtcagctgtacattgagatgctgaagggcggttacactcaggtggctgagttccattatttgcaccatgccccggatggtaaaccttacgcagatagcggggagatgaccgggcaactcagtcaggctgcggaacaagccgggattggcatgacgctgttacctgtgttgtatcgctacgccggatttggcgggcagcccgcgcagcccggtcaaaggcgctttattcaggatgtagagagttatttgcagcaacagcagaaaattgcccaacagatacggcatcaaccactacaaaatcaagggttatgttttcattcgctgcgagcggtagagttggagcaaatgcagcaaatactggccgtgtcggataaacagttgccggtgcatattcatatcgctgagcagcaaaaagaggtgaatgactgtctggcatggagcggtcaacgacccgtggcttggttatataatcatttaccggtagatagccgctggtgtctggtgcatgccactcatctggataatgacgaattatccgcgctggctgccagtcatgcagtagcggggctttgcccaaccacagaggccaatctgggcgacggtattttcccgggggttgaatacattcaacatcatgggcgctggggaattggttccgatagtcacgtttcactcaatgtggtggaagaactgcgctggctggaatatgggcagcggctacgagatcagcggcgtaatcgcttgaccagccctgagcaaccggcggtggctgatttgctgtatagccaggcgttatccggcggtgcgcaggcctgcggtacccaaattggagcattggcggtcggctatcgagccgattggttggtgttggacggtgacgatccttacattgccggcacaccttcatcgtcgttactgaatcgctggctttttgccggtgataaatcgcagatccgcgatgtgtacgtaggtggtaagccggtgattattggcggtttccatccgttacagcagctgagcgctcaggcatttttggcggtgctgaaagactgcctgcgggaggctttttaatgagtctgacattttttgattatgccagtttacccgtgagtcgctggcgcaatggcgggggagaaacccgtgaaattgcctgctggccggtaggtggcgaggattttggctggcgagccagcattgcgaccattgaacaaaacgggccgttctccacctttcctgaggttgaacgttcgataaccttattggcgggtgacggagtcaggttatttagcgcagagggtcatattgatcacgaactcgctcaatctttgcagccattctcgttcccgggggatattgcgctggaggcgacattgctcggaggtaacagtcaggattttaatatcatgacgcgaagaggctgctggcgcgcggatgtctgcatcatttctggtgcgcagccattgcccgtcagtcgtgccggtgtggtgtatgtggttcgcggtgattggcagattcaacacgaggaaagccgccggttatctcatcaacagggttgttggtggacgccaatgattagagggggacaattgcgtcccctggtcgcgaatagccagctaatttgggttgatttattatccgcagtttagtttgataatcaacgggtatgttttttgaatgatatttacacgcaccaataaaggggggctccctttgttgggcaatgatgatttatgttattaacatgaagagatttaatatttcatgtgtttatcggtatctaataatataaagaaattccgatgacgtttttcattgtgcatttttatatctacattttttaatcttcgatggtgtcatttaatgtctgtttagtaggggagttttcattttgattgatgaaattgacagctatttactcgcggcttaataagattaataacgggcgatgtgttcgccatattagctcactagcgagtgttagtgttttaggtgtttgctttttttattatttaatatctttcagtgggatagcggagtcggtttgttaactgtaattgattctctatcaggcgttccctgatgtcagtgacgacttttcccgacggttaaatagatataaatacctagttattaataatgaattatttatggataatgttttttattagaattaccatccttttatttttatggctaagaaatggttaacgtccagtacatgataattaatatttgtttttttatgttcaggtgatatgttgatatgtaacgcttcaattgtttgttgggtcatgatgagattttcttgaagtttactttcgtttttttgtttgtcgaaaatctctaaaactattgtgaagtataatcagcattttaattttttgtaataagtccatccgtgtaatggcgcaccaggggagtcgctttagatatgtttttttaactattaacttttcctattattgctattgcacttacggatattcatcttgtgatttcaaatcatcaccacatggttgggggaatataccagacgcttaccgtttatacggtgtcattttagctgtccagcactgagggaaaattgatttatctggcgtaactaggggcgtcgttaacggagagggcgcaatgaaccaatcgggatgatacaaatattcgcccagttaatgaatgaacaataaaggatttttaatcagagggaatcatatggcatcagatgacactgcggcggtattgctttctcggttgcgagctgcggggctcgtgctgtgggaggaagatggagagttgcactatcgggcacctgaaggttcactgacgccagcggatttgaaatcgttacgagcagccaagccattgttattaaaccagttgttggcagaacgggataaattcattctgcttgaaaataccgctgagcgttaccagccttttcctctgacagatgtgcaggccaattatcttttagggcgtgaaaatgtttatggctacggcggcattgggtgccacgtctatctggaggtcacctatccagatttagttgctacaagaacggaaaacgtttggaatcagctcattgcgcggcatgatatgctgcgagtcgtgatggaagccagcgacagtcagcggattttatctaaggttcccttttttaccattccctgtggggatatgaggaacctcacgagcgcgcaagcgcaaaccgcattggatcgaatacgagctgaactcagccataagaaatacgatccgcaacagtggccactgtttgaaataagaatcagccgaactgctgaatacagcgtattacatttgtcggtggatttattaatggccgattggtccagtatttgccttcttttagctgaatttgaaggactgtatgcccaacctgacaaagccttagatccgatagatgtcactttccgggattatttactagcagagcggaagttgcgcggtagcccaacgtacagtcgcgatcggcaatattggttgcaaagcttggctaatttcccctctgcccctgagttgccgcgcgccgaacatcttcctcaacctgagaatgcccgttttcggcggcgtcatctgaggcttgataatgaggactggctggatttaaagcagcatgcaacggcacacgggttaagtcctacctccattatattaaccgctttctctgcggttattgcgcgttggagtctgaacaaaaagttttgcctgagcttaacggtgctaaatcgtttggctgcctatccgcaaatagagcaggtcgttggaaattttacatccgtcagcctatttcccgttgactggcagtcagatagttcttttgcgcaacaggccgccgctatcagcgcacagctttttgctaatctggatcatcgtctattttcaggcattgaggtgttgcgggagttggttaggcagaaagggcgaggggccgcgctcatgccggttgtattcaccagcgcaattgggctaagggattataactctttgctgagtagcgatggtcgtttggatgggcgcggtatcacgcaggcacctcaggtatttattgattgccaagcggcagatgacgcgcacggattacagattaactgggatatccgtgagggaatatttcctatgggaatggcggatgacatgtttgacgtcttcaccgagttgttgcttgggctcgttgattccgttggtctctggcggcaaaaatatcagctaccgcttccggcatggcagcgaaaagaacggcaaaaagccaacagtaccatgatgaaaatcacctcgaagctgttgcatcaggccatatttcagcaggctgaacgaacgccgggagccgcagctgttatcgattcacaacaatcagttagctatggcgaattggctgaacgagccagggcggtggcgaatcgtttgcaactgttaggatgtcgtagcggtgaatgcgttgcggtggtgatgaataaaggtgcggaacagatatcggcgttattaggcattttttccgtgggtgctgtttatgtcccaattgatgtagggcaaccggaagtacgccgttttttcatccttaaagatgccggatgcaggctggtattgaccacgtcagagatgaccatgcgttggcctgcagaattgaaacgggtagatattgatcgtcttaaatctcagtgtcatgacatcatggttccgacaataacgtcagaatcgccagcttatgtcatttatacatcaggctcctcggggcaacccaagggcgtaacggtatctcatcgttccgcgctaaataccatattggatattaaccgcaagtttaaagtttcctctcaggatcgagtgttgggcttggctcatttggattttgacctctcgatttatgatgcactcggcctgctttctgttggaggctccttggtttatccgcgatctcatcgtgcatccgcatctgacccggctcattgggttgaattgatgctcaaacatagcatcacgctatggaatacggttccagcaatgatccaaatgctggagacttatttaaccagtatgccaccgattcgtatgccagcttggcgtttggcattagtttccggcgactgggtgcggcctggtttacctgacgccctaaaggctcggttcccacagcttcaactggttgtattgggtggggcgacggaagccgcgatttggtcaaactatcattgttatcaaggcgctcaaccggggtggcgcagtattccgtacggttttcctttagccaatcagagattgcacgttctggatgagaacacgcatgattgcccggtttggagtaaaggtgagatttatatcggtggtgacggggtagcgataggctatataggggatgaattcacaacatcccagcgctttataacccataaggaaacacattctcggttgtttcgcagtggcgactttgggcgctatcttccaggaggcgaaattgagtttctggggcgtgaagactgccaaaccaaaatcaacggacaacgcattgagctgggtgaaattgaatcggtactgtgtcagcatccaggcgtagccgccgctggggtggcgatcagcgagtttgaaggtcatatttcactctttgccgcagtagaaacacgccaatccaccgttcagcctgatccgataccaatacactttaaccttgagcgacgaaataggttggagtaccgcactaaacatatcttatatgaatacaccgcttctcaagttgttgctgcgttagagtcactcaacgaggctatgttggactcaatgcgttcggctctattacagttagggctatttgcgctaaatgacagggaaaagacagaacaatggataggtgatagtgcgatctcccccgatttctattggctcatagaacgatggtttgcggtgctattaactgaaaaatggttactaaaaaactctgatggttccgtcatgctggctaaccgaataaatcaaaatgaggggcatcatcgctggcgaaaagctgaatgtttatggaataacgttctggccaactcggagtttcttggctatctgaaacgttgtgctgacagcttaccggcgctattgaaggggacgctggatgccaaaaacctgttgctaccacagggcaatatggctgtcgttcaggcattgtattgcgaaaatatgatggcgcagtatctcaatgatacggtgcgtgatctaatcggcaatattgcgtcagatcgtttatctaatcgacgtttacgaatacttgaggtcggcgcaggaagtggttcgatgactcaggcagtattatcgatttttcgtaactattccgttgattatctgttcaccgacatatccacctttttcctttcggaagcacgcgcaaatttcggtagttttcccgatatctcattcacccgattcgatattgaacaggattaccgcagtcaggggctacagccaaatgggtttgacattgtgctagtcgatggcgtgctgggaaacatcagtcatctggaggaggccttatgccaattgattgagctggcagcgccgggcgcctggctaatcctggctgaatccacgcaggaacatccgtggatactggcttcacaggcttttatgatgaagagcaaaacggggttatcacgttctcaggccgcttatttaaaccgaaacgactggctgacccggcttgctaactataccgacggagaagttatttgcttacccgaatcgtcgcatccgctgttttctttggggcagcatatatttgccgcgcggttaaaaactcagcgtgcttttcttacagtgactcagatcggtgcctttcttcggatgcggcttcctgattatatgattccggagcagtggcaaatagtggataaattaccagtaaccgccaacagtaagctggatcgcaaacaattacgtcggtggcaaatggctgcgtggcaacattatcaacgccagccaacgacatcgggtaatgcgaatctattaaataacaagctggctgaaatgtggagaaatgcgttaggggtgacgcaactgacacaatcgcagaatctgtatgaaatgggggccgattctctgattatggcgcggatggccaggcgaatgcgtgaacagctaaaaggagcgccatatggtgttgatgagatcccttttgatgcattgttatatctaatgctaaatcaaccaaccattgaagcactggcagaatttatttggcattaccccaaaatgtcggcaatgaatattggccatcagcacactgctattggcggagaaaatactaaaccctttcgaagtaacggcatattttatcactatggaggaggtaataccgatgttacccgcatagtctttcacgcgggtttaggttcaatggacagcttccaaccgttattgacggaaatggctgagcaatctgtgggggcggtgatcggtattagcgtcgctgacgataagaaatattgtgctctagatacagaaaggttggttgaacgaattgcggatgattatgccaccttcttacttgctgccggatatcaacagctccaacttttagggtactgtctgggagggctttatgccgttgaagttgcccgacgtttaaaagaccgtggcgttaacatcctggacttggtgttagtcagcagtcatccggtgcgctttgaagtccacgatgaattgatgatcgaaatgttgtttctgcccaatctgagcatctcaatagagcagttagaattaggtgccataaatagcagcctattggttcagggttttatgcaggttattgaagctaataatggggtcatccccatggattcgttaggtacgataggtaacgggggaaacttggatcaggtaggcgaactgtttagaacgttgaacacccaaactcgccgtcaacgatttgaatgttatgttgctgctaaggcacgtcacattgggcaaactatgccggtggagaaggctatggagctttttaccgtctttcgccaaagctttctctctgggcgcttcacgcccacaccttatttgggtgatattcgttttttgctacctcagcaaggttatgatttcgcgccaggaattgatagtcagacattagcgttttggcgtgagatctgtttagggacaatgaaagtaactcatattgaaggaaatcatttcagctgtattgccgcagaaaatgtggcgtcattggcccgtttaattgctttaccatttcagaagtaaatgaggggcattgaatagacccgggtttcgtaggcacttttttgcctcataatggaggctcaatgaaggagtgtttatgtcagccaaaaatttcactgaagaattcaaaattgaagccgtacaacagattagcgagcagggataccctgtttctgaggttgcggcacgactcggtgtttctaccaacagcctttacgcgtggattaagcgttaccaaaaacctgaaccacagcgaaagcaggacgatgcccttcagcacgaagtaaagcgccgcaggcaagaacttaagcgtgtgactgaagagcgagatattttaaaaaaggccgccgcgtactttgcaagaacgtcaggctgaagtacgccttcattaaacaaatgtcctccttttatgctgtacgccggttgtgtctggttcttggcctccattacagcggttattaccagtggctaaagcgacctcaatctttgcgtgccaggcaagatgagcgccaaacaggtcttattaagcagctgtggcttgaaagtggtacggtttatggttatcgaaaaatctggctcgatatgaaagacttgggtgaacgcgctgggcgtaacaggatcgcgcgcctaatgaggcttgcagagttggcttctcaaaccggataccggaaacgacgctattacggcggcggaaagccttcagttgccagccctaattaccttgagcgccagttcattgttcctaccccaaatactcattgggtgagtgacatgacctatataagaacgcatgagggttggttgtatctggccgttgttctcgatctcttctcgcgccgggttatcggctggagtatgggtggacgaatgacagcagagttggtgatggacgccttgttgatggcggtgtggcgacgcaaaccagcggcagaagtactaatccattcggatcagggttctcaatatacgagcgaaagatgtcagcactttatgacagctcacaatttaaaaagcagcatgagtcgtcgtgggaattgccatgataacgcggtggcagaaagttttttccagttgctgaaacgagaacgcataaagaaacggatctataaaaatagagaagaagcaaaggctgatatcttcgattatgtagagatgttttataatgctaaacgtcggcatagtgcctgtgaagatcaaccccctgcagtttatgaaagtgcctggttcatgaggcacgctaccgtctaggaaactggggtctattcaaaatcgctggaaaagctggaaactcaatatatctgccgggtattgcgtattgctgaggaattggtgaagcaattccggttttccagtgtattcaacgctgggttcgttacgctatcgcttaaatccagtacccgacgcttgttgaatcgtgagctaggtaaggtagaagcaaagcgagtactgaaacgctggaagcaccttctgaaacccctgaggcgagatctggctttactgctggatcattacgaaggtacagcattgaccaaccgttacggtaaatgtgttaccaatgcggtagggcagtcattcaatatcacctacaaagatgtggcagcgcgtaaacggaggaagtcagatgtgatgcgccggaagctgctttcgcatatgttacagggcctggaaagtcaggccgtatacgattacgttgccagccataagggcgtttgtgcgctggaacacgatgggtttgtttcttatgaagagatcactgactggtcccatccatatctgttgattgagaaaaagcattaaggggagccactcagtcaattacagcttatcccggttgatagactagacgggacatttagctctttcatgatgtgcatagcaggtgatcctagcctgctttcagcgaggaactgacatttaatttatattttttcaggtggttacattcagtaatccaccacatttcctcattatcagcgtctccgcagcaaaatcgcccacagttgcaccctacagaaattgacactattgttggccgagaggtactggctgtgggctggaaagcgataagagggcgatgaaccacaaaatattcccgttttgttactttgatacgattgctcaaaatgggtggcaacactgagatagttgaaatgactgcatgttacattgttacttttgttaccgttgaaaacatcaagttggagagctaaatggattggccaaaggagtacagcaagacgactcaagcggtaagagatgcggcgtataaacactactatgttgaagcaatcacacggtcggttctgctaccgggacaggagaaaaccgcttatcacgatggactactaacgacggattattaccttttcctgttcaccagcagggagaatccgaagcttacagggtattttacctgtggcttgtatgctgcaaaggggtggttcgagttgaacggacagcgacctgaggaaattccatcatacaacccccttacgggcgagtcctccggtggtagtaaaaagagtggctgcgggattactaaaccgctgaaagctgaatcagacccaagaatgaaacgtcttatcagggtactccagacgttcatttctctgacggacgatgagaaaaggaaaataaaaggcgagtcaaccacactggctgtcctacagaagctcataaaagcgtcaaaagaagcccccagcacgtcaaatattagatcagtaaataccactctgtacaaagcgctcaaggatggccgtcatggtggtgctcgtacattcactcaactagttggttattacgagattcttcttggtgtgactttcaagaagatatctattgatgatttcaatcaggagatcgacgatacccgtaacaagtcagcgacatatccgtatatccctttggcatcattctgaaatgaagtgctacagtcttgtctgctatcggcccatcgatcaagcttagtgggcggaagctctgttaggaacgaggggctggtcacggggtggcgattggaaaatgctgagtgatggatttcgcttccagctcaagcgttaagattgagctagctgaatatagttctttataacgacagcattagttcttaggaaatctaccattttatggcagtattcttaaacacactatgtcaaggaatacgtatgtcaagaatcaccgtcaaagctggagccgactttcttactggattggctcatgcaaaaccagttgccgcattgagtgagctaatttggaatggttttgatgcaaaatctaagcgtgttgagatcgagattaagacggatctggcctttggggggattgaagcaattctgattaaggattatggtaccggaattgctcacaataaagttgtggattactttggtaatctcggtgaatcttggaaaaaagctgagaaggcaaatggagatcgttccctccatggccagtttgggcgggggagattcaaatctctttctcttggtgaacaagttcattggaaaaccgtgttcgaaaaaaatggatcaaaatataaatacacgatttcaaccgatgctaataaaattaacgattttacaatcagtgagccagagttagctgatgatgaagatgtaggtacacaagtagagatttataatgctagtaacactgcggagcttttattaactgaagatgctttagctgatctaatcatggaatttgctcttttccttacagagtatccaagtaggaagttaatattcttaggtaagagtgtctcaccttttgatgcttggtctgacaaacaggactacgatataggcggggtgagtctcccagatggttcattgattaatgcttccttgactattatagaatggaaaaagaaagttcatagggaacttcattattgtgatttgttagggttttctctatacaaagagaaaattgggcagattattcgcgctcctgggtatgattttacactctacgcgaagtgtgattattttaagacgctaagtaataaaaatgaagtatctttaggtgagcttattcctgaggttagagcgattaaagatgctatcattcaacgggcgaagattcattttctcgacaaagcatttcttaataaatccaaaatcgtcgactcttggaaagaacaagaaatttacccatataacgatgacgtactccaaggtccgacggaagtaattgaacgaaaggtgtttgatattcttgcggttaatgttcaaagctatctcaaaagctttgaaagtgctgataggaaaacaaaaaaattcacctttatgctcttatctcaagcgattaaacagaatcccacgtctgttcaaaaaattctaaccgaagtgttaggtttgaagtctaaagagcaagatgaattggctgcgttattggagaggacaaccttatcatcaataattagtgcttctcagattgtgtctaatagagttgattttattaatgggctagataatcttttacatgataaaaatacaaagaaaacattattggaaagagatcagcttcataaaattatagaaaaggaagcttggctttttcgggaggactttttccttgctggttctgaagactggcttgaagatgttttaaaaaaacatatcaagcatcttggcaaaagatatgatgaggatgataacgaacctgttttactcccagatggaaggcaaggccgcgttgacctaatgtttgcaaagtgccgtcaaccgtatgaaggctatacagagtatttagtcgttgaacttaaacggccctctcagaaaattaattacgatgttatcggtcaggtcgaaaaatacgcgttatctgtttctggggatgaacgttttgatcatactaaatcaaaatggactttcatagcagtgtctaactcaatggatgagtatgctgaacgtagggctaatcaacgtgggtggcctaaaggtaaaacattagatgatgctgagttaaatgttgaagtatgggttatgatctgggctgaagtgttgaatgcagcaagagcaaaattaagtttctttagtaagcagttgaatctagaggcatcaagagatgatgcaacatgttatcttgaaaagacacaccgtgaatttattccggttataaatagtactgaagaagtctaattatcctcaccgccttcgggcggttttttgttgttattaaaatgatctacgcattctaataattataaagctacgacgacttcctgtaagtatccctgcaaaatgagtcatcaatttttagagagtttctggcacttcaacttccgcttctggctcgaagtcatgtggtctgccaagtgctagaagcggatgtacatggtcgtgaattagtaatctgcctagcagaaagattaatctgatccacctaacatggatggtgaagtggaccaaacagcaggatattatcataccggtattgcgttaattctgaccaagcatatgagtctattcaataattaaactttcaatgaggataccagagagccttttcttttagcatgatcttttcgcaacaaaacaagttcaagcattgcatagggttcaagagacttttctataatgctctcttcatcgataagttcatcaaaagaagaaggactatttaaggatctaaattcttttaagatggcttgatattgctctgataaaccataatgttgcgttagttctatgaataaatcccgataatatattggcctgttaatcggatatgaatctatgatttcggcgagagtacttaaaacaagaatgtgaaacgtctgaaaaggccatagttgctcatgttttcgattcattttcaggtgccgtgggaaagaggggcctttcttgtctaatgctggtgtaaaaagatgtctcttaatcatccattctttccaaaacgaatagttagccttgaagaatgtgtcgtaaccgtttgagtattcagaagctaacatttcgaccttttcttttatatggcgtagtttgtcgatgttaattaattctagtatatattggttccttcttttctgaatgcttgcctccacagaaggatgtttcaaccatgagcaatgaataacattagacgcatcgtcaaagtaattacatatcgcatatttcccagcgggggttcgcaattcaggaatgcaacttgagtatgaataaccaactctgatcgttctacctccagtaaatatatcgaggacgacacattcatcagactcaaatgtcagcgagactttttgacatgtaacggtgcgggcagtaaatacctctctatttatgttatgcgtcttaccattgtgttcgactactatgtcttggcatatgccggggagatacagcgttttatcctccatagaacgtttaatgagttcgtgtactttagattctctttcagctttggcctgttgcttttcttgttcaatcttttccaggtgcttgagtttatttttctcaagggctgagtggtagatccatttgtagtctacgcggttaacttttagtagagcgatccattcgtcaatgctcctgttttcattcggtggaaaacggtactcaatcgaatcaatctggtggtcgatgtaatattgtctcttctcttcctcacattcatgagtgacccagacttcaattgctacaccaccaatgcctgtctctaggtacacatctgcccagtatttcccgagtttgtactcaagggttgatttactgacatctgtagtaaattcaggaacaaatatatcagtatcatcaagagttaacgaattttggggaagggtaaacttggatatcgataagaagtgttgctgcatcccgatgtgcagctgtgtcatttgacagtctcggctttcttctttggttgtgtgagagaaatggtggcttattaccctaccgttgttctttgctaccagagcgtccccacagttcttacagatgcattcacaccgtttgccgttaggaacggcatcaacgtgaacaattttgtttgtatctttatggagggcatactcaaaaagcatttattcttttagcatcctttctcagatatatcgttgatttatcatcatttgttctattcttgattggaaggcatcttttccaacttatcggtttattcttgcatcattaccctgctttcatcaaggtaatgtaaagatctcgtataaccgagcgctggctgatgtgtaagtatcccgcttaaacggcccattcacttttagagatcttccgacatactgatgatgtcacctgaggagatccttatgcgcaagatccgatttaccgagcaccagatcatcgccgtactgaagtccgtcgaagcgggtaggaccgtcaaagatgtgtgccgcgaggctgctatttccgaagccagctattacaattggaaggcgaaatatggcgggatggaagccgctgatatcaaaaaaatcaaagatctagaagacgagaatcgccgtctgaagcagatgtttgccgacctgagtctggaatgccgtgcgctgaaagacgtcatcgaaaaaaagctttaaaaccagcgataaagcgtgagctcgtcaactatctgaccacgcagtttacgatgagcatacgccaggcatgcaggacgttatcgctgagcaggacggtgtttcgttatcaaccgaatacacgacgtgatgaaccggtgatccagaggctgactgagcggctgaacgctatccccgctatggatttaagaagctttttcaggtgcttcgcaggcagggatacgcctggaaccacaagcgcatacaccggatttactgtctgctaaaactgaattttcgtcgtaaagggaaacaacgcctgccggtgcgtaatccggcgccgctggccacgccggaagccctcaaccaaagctggtcgattgattttatgcacgacgcgctgacatgtggccgacgttttcggaccttcaacgtcgtggatgattttaaccgcgaggctctggctatcgaaattgacctgaatattccggcgcagcgcattgtgcgggtgctggacagaatagcggcaaaccgtggctatccgctgaagatgcggatggataacgggccggaattgatatcactgacgctggcacaatgggctgaagaccatggcgtgatgctggaatttatcaagcccggcaaaccaacacagaacgcgtttatcgaacggtttaaccgaacgtaccggaccgaaatactggatttttatctgttcagaacactgaatgaagcacgggaaataacggagcgctggctgaatgaatacaacagtgagcggcctcatgaatccctgaataatctgatgccggaagaaaatcggctgatggctgagaaaccggaaatctcaaaaagtgtgtggaactaaagctgggatacttacatcgcgagcttcggcaagtttgaccgtcgggtactcacccagcgcaaacatgctggatttaccgttgagtttaaaccgatagcgccatgcctttttgccattgggtttcacttcgaggtagagaccattgaaatgattgagccgatagagtttttctttcggcttggctgtgcggcattgtgtatcagtgagcatagcgagtctttgtctagttcttataccgcgattgtactcatccctataatcatttttcactgcattgtcatgaggttatgtgagacgccatgaaaagaaaaatccacgcaattgcgtggattttatgatgtttgtctgtcttcatgcgatacattgatatcccaagagacaacaaaattaacttagacgttaaacaagaagttcatgacatcgccatctttaacgatatagtccttaccttctgaacgcattttgccggcttctttcgcgccttgctcacctttgtaggtgatgaagtcttcaaaagcgatggtctgagcgcggataaagcctttctcgaaatcggtatggattttacctgcggcctgcggagccgttgcaccgacagggatggtccatgcacgaacttcttttacgcctgcggtgaagtaagtttgcaggttcagcagttcgtaaccggcacggataacgcggttcagacccggttcttcgatacctaactcggccatgaattcagcgcgatcttcgtcttccatctcggcaatatcagattcaacggccgcacatacggcaaccactacggaaccttcagccgcggcaattgcgcgcacttgatccagatacgggttattttcgaagccatcttcatcaacgttggcgatatacatcgttggtttcaatgtcaggaagcttaagtagcggattgctgctttgtcttcagcagtcagagtcttcaatgcacgcaacataccggcattttcgaggtgtggcagacatttttccaacgcttccagctcagctttagcgtctttatcgccgcctttggcttttttctgtacgcgatgaatggcacgctcacaggtgtccaaatcggacagcgccaattcggtattgatggtctcaatatcgtcagccggatcgactttacctgcaacgtggatgatgttgtcgttttcgaaacaacgtactacgtggccaatcgcctcagtttcgcgaatgttggtcaggaactggttgcccaggccttcgcctttggatgcgccctttaccagaccggcaatatcgacgaattccatcgtggttggcagaatacgctgcggtttaacgatttcagctaattggtccagacgcgggtccggcatgggtaccacacccgtgttaggttcaatggtacagaaggggaaattcgctgcttcgatacccgcttgtgtcaacgcgttgaacagggtggatttaccaacgtttggcagaccaacgataccgcatttgaatcccatgtttatatcaccttaaataacttaaaaatcagccaattaggtttaaccagccgatgtaatcaaaatttattccgccattatacacataatgatgatttatctcgatcctactgtttgacgcagtgattttaactgcggtttagcctctgtattttaccggtctatctttatctgggatcccgagagtcggtcataatttgttgttcttgcatataatcttggtttgttgaatttatcgctttcggtgagagtgagaagtaaacaagggaacgccgaataaaaatctacagcattaccggtttgctgccgataaccagtgattacacctgatgccaactatggcgtcttactgttctgatagggtattaaatatggtgatgagcggctttaaatggttgttgctgatcttatttggctctttgctgggcatcactatcacgcattatttaaccagagtggacactgagcgtcctttaacctggttagagcaaatcgataattacggaaaattagtcgagcgtcgctccgataaaagcattaaatatatcggagtgaaaaaggtgatgacttcgccagaaatggacagctatttaatgcgttttagcgcattaaccgatcgctatgaaactaacggtaataaagtcgctaatcagaaaaaatcggatgagtgggataagtttttctgtactgatggattaaagaatattatcggccagtataagaatcgtcgggtcaaagtgatggtgccaggtgcggtttacagcaagaccggagcccgtggcagcgcgacggcctgctatattaattagctaattatttgtttaacatgtttttgagtgagagttttcttagttttttgtgcagtacgatataattttcgcaacattgaatgatttcttcatatttttcttcatcgatcgtgttttctgctgaaatggctcttcggctggacattcggcatttataacacgcggattttaatttatcttttaactcattaaattcggcgctggttttatattccccccaaaaatcgagtgaaatacaggccagccgtatggctttattaaattcacccactttcttcgattgataatcaaagttctttatgctgcggttttcgcaaactctttttaacgctctgatacttctgactgtatcgtaagtcagtttcaaaaactgctcgactagcagagcagtttgctccgtttttttattatcaaaccattttatcgcgactacggccgcagtgattgccataatggcactggaaatcgcaatgacgatatctgaaattgaaccccattccatagtctcaatcctaataaattaaagtgtattggcgttttttataataattatccttgccctcggtgatgaatatgagggcaaggggaatattatgcgttggctttaaatgaatgcaggcgattcatagccttggtcacgtcttcttttaataaaacctcggtacaacgaatagcttcatcgatggcatcatcaattaacgtttgttcgctcgccggtggtttccctaagacaaatccggtcactttacttttatctcccgggtgaccaataccgatgcgcaagcggtaaaaattgggattattacctaatttgctttgaatatcttttaaaccgttatggcccccgttaccgccgcccagctttaatttagccacgccgggcggaatatccagttcatcgtgcgcaactaaaatttcttccggtaaaatacgatagaagctggccatggcagaaaccgctttgccgctgagattcataaaggtagagggaacaagcagtcgaacgtcctgaccggccagatttaaacgggcagtgtagccgtagaatttactctcttctttcagagattgattattacgctcagccagtaaatctacgtaccaggcaccggcgttatggcgggtttgggcatattcagcgcctggatttgccaggccaacgatcaatttaatgctgctcacttcgttattcgctattactcagagatgaaagaaccctagtttacccgtcgccgcgtagaatcacaaaaataagggggagaataaaggtaaaactagcggataaggtaaatactaaccatggttaattattcaacaattaggccaaataatcgcttaatgtaaagatttatagaaatatctttgccagatgtgatcgtctccgcaatacccttatgctttccctgactatactaagtcattaagtacaggtgaacaattcaataggaagagttgtttaaaggaagtgaatgcaggaggtggcatatgaaacgcaaaaccgcaacaacgttaggtaacgcgctgatggggctgggtctggtcactatggttgttggggtaggttactctatcctgaccgaagtttctcaacttggtttaccgcagttcttctcccacggtgcggtcatgagcatttttgtgggggccttgctctggctggtcggggcgagaatcggtggccgggaagaggtggcggatcgctattggtgggttaagcatttcgataaacgctgccgccgtaatgagcgacactcataatattgacgtatttatcgtcagtgaagtgtgatgccagaaaatgttaccgaaaatgcagctgaataattcaaactgagggtagggaattaaatgacagcccaagagtagaaagcccgttgttgcttgcgcttcaacgggtttttctttttctgcgtttaaccgcaaatcactgtcagtgcggcgataagtcagatacaacctatgccagacttgcagcgcctaagcgctgcagagagtgattaatgctcaaacatcgcagagatggactcttcgttgctgatacggcggatggcttcagccagcataccggacagcgtcagagtacgaacgtttttcaacgctttgatttccgcagacagcggaatggtgtcgcaaacaatcacttcatcaataactgaatttctgatgttttccactgcgttaccagagaagatcgggtgtgtcgcgtaagcaaatacgcgtttggcaccacgttcttttaaggcttcagcagctttacacaacgtgccaccggtatcgatcatatcgtcaaccagcacacagtcacggccagcaacgtcgccgatgatatgcatcacctgggaaacgttagcacgcggacggcgtttgtcgataatggccatatcggtgtcattcagcagtttagcaatagctcgtgcacgaacaacaccgccgatatctggtgaaacaacgattgggttttccagattctgctgcaacatatcttccagcaggattgggctaccaaatacgttatcaaccggcacatcaaagaagccttggatctgttcagcatgcaggtccactgtcaatacacggtcaaccccaacacttgagagaaaatcggcaacaactttggcagtgataggcacacgagcagaacgcacacggcgatcctgacgagcgtaaccgaagtaagggataacggcagtaatacgtcctgcggaggcgcgacgcagggcatcaaccatgacaaccaattccatcaggttatcgttcgtgggtgcgcaggtggactggatgatgaaaatatcaccaccgcgtacattttcgttgatttgcacgctcacttcgccgtcgctaaaacgacctacagcggcgtcaccaagactggtgtacaaacggttggcaatacgttgtgctagttccggggtggcgttaccagcaaaaagcttcatatcaggcacgagaagaacctcaggcttgcgtccagagaagatattgtcagccagtagtcaggggcgattcatcctactgattgcaatatacatacgggtatttaaaaccaaaacattgttaacctaaaagagcgttatgagccggcttttaattcagttaagaaggcaacgtgttggcgacgcaggataaaccgtaatgctatggaaaaacctgagttgccacgcaaatcgctgcttatttctcaacttttccagagcgtacaagatgcagtggtgagacgttaacgccacgagccacaaaaccctgtaaccactccggggcaatacttaacacctgacgggccgatgactcggtatcaaattcagcaaatacacaagcgccggtcccggttaggcgcgacggggcgtattgtaacagccatgaaagaacctgttcaacctcgcgaaaacgttttcttgcgatcggttcgcaatcatttgcgtaaggagcggctaaaagtgccgccaaggggcgaactggcgtgtttcttgttaaatccggatcggaaaaaataattggcgttgggatgctaacgccggggtgtgcgaccaaataccagcgctcaatgggctgcgcgggctgcaatttttcgccaattccttcggcgaaggcggcatggccgcgcacaaataccggtacgtcggcacccagttgcaggccaagatcggctaattcttcatcattcaatccgcattgccacaggtgatttaaggcgaccaataccgtcgccgcgttggaggaacctccgcctaaaccgcctcccattggcaggcatttttcgatcgaaatatccgctccgtggggggtatcggaacctgccgtatgttgctgcaataaacgtgctgcccgcacgatcagattttgttcgttttccaccccttcaagcggcgtaagtaaacaaatctggttatcatttctcggtgtgatagtgaggctgtcaccataatcgagaaactgaaatagcgtctgtaattcatggtaaccatcggcgcgttggccggtgatataaaggaataaattcagttttgccggagaaggccaggtgtgaatcatttgacagtccagttatccattttcagtttgatgcgttgctgatcctgctttagctccagacgactcggtaaaactggggtcaccttggtgttatattcttgataatcaacggtccacacttgatttccctgcttataagtcagctgtttcaggcgatatttatcgtcgaggacaaaatcgttggtttcgccgggcaggccgagaatccattggcgcaggctattgataggaatgtccatgccggtaagtttggcaatcatttcttccgggttatcactaacgtagcgtttgccctggttatccgtcagttgagtaacgcccggctgcacgaccagctccatctcggtgctgcccagcggattggtcagcagcagacggtaacgatccgctgaatattgttgccagaagaaacgggcataaaccttctgtttatctgaaatataagcgaaagagccgcgggtctggaactggctgagttgctgcaattgttgctcatgctgttgccactgcggcgaggtggggctcgtcgccgggccagtcgaggtggtggtagtacaggcggctagcatcaggctggctaatggaagcaggcgataaaaagtgaccttgcgcatgggcatatcaatatcaatcctttaaaagcgtggttttcaccagcgaggcatttgggtgctgcaaagttgcagccaaggtgctcacgctaacggtggtaaggcggagcgtcaatatcttgtttatgtcgtgagcaatttacccacgatatccgtgatattaggacggataatgcggtgtgactttaattgctctcgcgcatcaagtagaatgcgactcagacgagaatccatactaagacaagtattactctaagccgttctcatgaccctgctcgcattaggcattaatcacaaaaccgctcctgtctcgttacgtgaacgggtgacattttcacctgactcgatcgaccgggcgcttaatagcttgctccagcaaccgctggtgcagggcggtgtggtgttgtctacgtgcaaccgcaccgaattatacctcagtgtagaacagcaagaaaatctgcatgagcaattggttgactggctgtgtcattaccaccgcctcagccgcgatgaggtcataaaaagcctgtactggcatcatgataatgaggccgtcagccacttaatgcgggtagccagtggtctggattcgctggtgttaggcgagccgcagattctcgggcaggttaaaaaggcgtttgctgaatcccagcggggtcaatccctctctggtgaattggagcgtttgttccaaaaaactttctccgtagccaagcgggtgcgtactgaaaccgatatcggtgccagtgcggtgtcggtggcttttgccgcctgtacgttggcgcggcaaattttcgaatccctttccgaactgaatgtgttgctggtaggcgcaggtgaaaccatcgaattggtggcgcgtcatctgcgtgaacatcaggttaaacatatgattatcgctaaccgcacccgtgagcgggcgcagtctctggcggacgaagtgaacgccgaggtgattaccttgccggaaatcgatgcccgcctggccgacgccgatatcattatcagttcaacggccagcccgctaccgatcatcggtaaaggtatggtcgagcgtgcgctaaaagcgcgccgtaatcagccgatgctgtttgtcgatattgccgtgccgcgggacatcgagcccgaagtcggcaaactggctaacgcctatctgtacagtgtggatgatttacaggcaattattcagcacaatctggcgcagcgtaaggctgcggcggtgcaggctgaatcgatagtacagcaggaaagcatgaattttatggcttggctgcgttcacagggggcggtagaaaccattcgggattaccgttctcaggctgaacagattcgtagtgaaatgaccgccaaagcgctggcggccattgagcagggtgcgaatgtggagcaagtgatcaatgaactggcccacaagctgaccaaccgcctgattcatgctccaaccaaatccctccaacaagcagccagcgatggcgatatggagcggttacaattattacgcgacagccttgggctggatcagcattagtttcctcaattaacaggatttaaaaccgcggatgaagtcttctattgttgccaaactggaagcgttacaagagcgccacgaagaagtggaagcacaccttggcgatgccaatgtgattgccgatcaggagcgttttcgtgcgttatcgcgcgaatatgcccagttgaccgatgtgacccgttgctttaaagagtggcagggcgttcaggacgatctcgaagcggcagaaatgatgctggaagaccctgaaatgcgtgaaatggcgcaggaagaactgaaagaagccaaagcccgtagcgaagagctggaacagcagcttcaggtcttgttattgccgaaagatcccgacgatgagcgcggttgtttcctggaaatccgcgccggaaccggcggcgacgaagcggcgattttcgccggcgatatgttccgtatgtacagccgttacgctgaggctcgtcgttggaagatcgaagtaatgagcgccagcgatggcgagcacggtggctataaagaaattattgccaaagtatccggcgagggcgtttacggtcagctgaaatttgaatccggcggtcatcgcgtccagcgcgtgccagaaaccgaatctcaggggcgtatccatacgtcggcctgtaccgtagcggtgatgccggaaatacctgaagctgaaatgccagaaatcaacgcgggcgatctgcgcatcgatactttccgctcctcgggtgcaggtggccagcacgttaataccaccgattccgctattcgtattacccatattccgaccgggattgtggtggaatgtcaggatgagcgttcacagcataagaacaaagctaaagcgatgtcagtgctgggtgcgcgtattcgcgctgccgaagtgcaaaaacgtcagcaggccgaagcgtctgagcgtcgtaacctgttagggtctggcgatcgttccgaccgtaatcgcacctataacttcccgcaggggcgtgtcaccgatcaccgtatcaacttgacactgtaccgtctggatgaggtgatggaaggcaaactggatatgttaattcagccgattgtgcaggaatatcaggccgatcagctgtccgcactttccgagcaagattgatggattaccaacgctggctggcgcaggctgcggcacgctttcagcacagtgacagtcccaagcgcgatgcggaaattctgttgggtcttgtcaccgggcgtcagcgtacttttttgctggccttcggtgaaaccgaattgaccgaagagcagaaagaacaactggaactattagccgccaggcgagagcagggcgaacctatcgcctatctggtcggtgagcgcgagttttggtcgctgccgttgagcgtgtcttcggccacgttgattcctcgccctgacaccgagtgtctggtggaacaggcgctggtgcgtttacctgaacaaccttgtcgggttctggatttaggcaccggcagcggggcgatagcactggcgttggccagcgagcggccagattgtcaggtcaccggcgtcgatctcaaaccggatgcggtggcgttggcgcgccataacgcggaaaaactgagtctaaacaacgtagagtttctgcaaggcagctggttttcacccctcaccgggcgttttgcgttgatcgccagtaatcctccttatattgatgccaatgatcctcatctggagcagggggatgtgcgctatgaaccacacagcgcgctggtggctgaagatgaaggtctggccgatcttgcggccattatccggcaggcacccgattatctggaaccgaaagggtggttattgctggagcacggatggcaacaggcgacagcggtagagaaactgttgttgcaggccggttttagcacggtggcaacctgtaaagattacggtaacaacgatagggttactttggggcagtggttgccgcagatgacacataattagaatgaaaatggagtgactcatcatgtggattgattatatcgccatgaaatatctacatttggcgacggtggttatcagcattagtctgtttgttttgcggttcttctggaaatgccgcggttcagctatgatagacaaacgttgggtgaagataacgccacatatcaacgacacgttattgtttgtcagcggtattgcactgatatttatcaccgggttttacccgttcagcccgcagggtacctggcttacggaaaaactgttcggcgtgattctctacatcgtgttgggctatgttgctttaggtaaacgcgaccgtagccaaaagacgcgttgtgtggcctttatcctcgcactgggttgtctgtacctgattattaaactggcaacgactaaattacctctgctgatgggatatttatgagtaccattgctgatttcgaattcaacaccgcgcctttgagtgaaggggtgttactggttacccaggaaatccgaccgaactttccaatggctgacgttcgcaaccaactgcaacagttggttgatgatgcccgcgcggcgatgcccagtgacctcaatcaagatcagcaattggaagtgcttattgatttgttctaccgcaagtggaaattcggtggggcgagtggggtttaccggctgtccgatgcgatctggctggataaagttctggcgaaacgtcagggtacaccggtttcattgggcgtcatttttctgcatatcgcccatcaactggatttgccattgatgccagtgatttttcccactcagctcattcttcgtgccgattggctagacgaagaaatgtggctgattaatccgttaaacggggaaacgctgaacgagcatatgctggaagtctggattaaaggtaatttggggctgtctgcggaactggaagatgaagatctggaagaagcggaacataccctgattattcgtaagatgttggatacgctgaaagcggcgttaatggaagagaaacaaatggagctggcgctgcgtgccagcgaagcggtgctggcgttcgatcccgatgatccctacgagatccgcgatcggggtttgatttacgctcagctggactgcaatcatattgccatctctgatttaagctattttgtcgaacagtgcccggaagatcctatcgctgaaatgataaaaatgcagattcactccattgagcagcagcgtattactctgcattaacataatttgatagggcgctgaggcgtcgtgatttattccgatttaccatcattaaaggcataagcatgaaacaaaaagtggttagcattggcgatatcaaggtagcgaacgacctaccctttgtgctgtttggtggcatgaacgtgctggagtctcgcgatctggcgatgcgcatctgcgagcattacgtcaccgtgactcaaaaactcggtattccttacgtattcaaagcctcgtttgacaaagccaaccgttcttcgattcattcttaccgcgggccgggtctggaagaaggcatgaaaatcttccaggaactgaagcaacagttcggcgtgaaggtcatcaccgacgtgcatgaaatcagtcagtgccagcctgtcgctgaagtggtagacgtgattcagttacctgcgttcctggcgcgccagaccgatctggtggaagccatggcgaaaaccggtgccgtgatcaacgtgaaaaaaccgcagtttgtcagcccaggtcagatggggaacattgtcgacaaattcaaagaagccggtaatgatcaggttatcctgtgcgatcgcggcagtaacttcggttatgacaatctggttgttgatatgttaggtatcaatgtgatggtgaactctaccggcggtcatccggttatcttcgacgtcactcactccctgcagtgtcgcgatccgtttggcgccgcgtccggcggtcgtcgtgcgcaggtcgccgaactagcgcgtgccggtatggctgtgggtctggctggcctgtttatcgaagctcatccagagcctgacagcgcgaaatgtgacggtccttccgcactgccgttggataaactggagccgttcctggtgcagatgaaagccatcgacgatctggtgaaaagcttcccagagctggataccagcaaataagctgagttatttcgcgcactaaagcgatacaaaagggcagcgtggtggataactatgctgccctttctgttgtgaccaattcggttttaacgttgtttcagcgctgcgagcgcctcgggtagagagccgtagaagctcagcttgcctggaatcggcttcactctagcccgcgccagcgttttcaatggctggaacggcgtatcggtaattatcagctcccggccttctggtagggcttccacaaagcgcaggaaggcgttcaaaccgccagcatccagcaccggaactgcgtcccactgtaagacaatggttcgtcgattctcgctcatttctagcaactcattgaaaatacgctcagcagcggcgaaaaacagcgggccgttgactcgtaaaatcagcgtttgattatcctgagcgccggacaacgggctgaggcgagtcatacgggcaatgcggcgcataaacagcagggaagccagcacgataccaacggtgatagcgataaccatatcgaatagcaccgtcaggctcatacacagcagcatgacgataatgtcgtcttttggcgcccgccgcagtaaatctaccactttgtgcgcttcgctcatgttccacgccacgatcagcagcagggaggccattgccgccagcggtagataagacagcattggcgccaatatcaataacgccagcagcaccagcagggcgtgtaccaccgcagaaatcggggaagtcgctcccgcgcgcacgttggcggctgagcgagcgatggccgctgttgccgtgattccgccgaagaatggcgcaatcatatttcccaggccttggcccaccagctcgctgtttggacggtgtttctggccggtcatcccgtccagcacgacagcgcatagcagcgactcaatggcaccgagcatcgccatggtgaaggcggcgggtagcagagcggataccgtggcccagctcagagtaaactcttgcccatgagcggccggcaggttccacggcagtacgaactgcggcagaatcggtgggattccttgtccgtaggtaccatcggccagcatatagctgaactttgaaccaatggttgccacttgctggtcgaacagagacaaaacccacatgacagcggtgcctgccactagcgcaggtaagtgacccggtaacttaatcccaagcctcggccagaaaatcaagaccagcagcgtcacgctgccgattaaggtatcgctgaaattaaggctcggaagcgcctgcaccagcgctgaaactttactcatataattttccggcacgacctccatctgtagaccaaaaaagtcttttacctgcatggtggcaatggtgatggcaatcccggaagtaaatccgagcgttaccgatagcggaatatattcaatcaatcgtcccagccgtgctaatcccatgcagagtaaaaacagaccagacatcagcgtggctagcaataatcccgcgaggccgaactgctgtgagaccgggaataagatcaccacaaaagcggcggtagggccggagacgctgtaacgcgaaccgccgctgactgcaatgacaataccggcaatagcggaggtatacaggccatattgcggaggtacgccgctggcaatagccaaggccatcgctaaaggaatggcaataatcccgacggtgatgccggcaattatgtctttaataaatcgttgaagtgtataggtttctcgccagcaagcttcaataagcgcgctgaacggcctaatgccgttaattccgtgcgttttcatctaaggtgcaaaccaaataaggaaaagacaaaataaatggcgggccaataggggtccgtctcgagtagtgaatatcaacgatacgccaaatgtggggcagagatctagatgtatatcaatctctgatcggaataaggataacagggggttttaaaatgtccttataagcgtaaaaagcacgtcagataacggattaaagcatcgatatttattcattttatgaacttttatcagttatagatgaatatttattactaatgagtaaaagagaataataatgattactttgcactcaatatttggggggcgtgggtggcgtaaaaaacgctgggtaatgtggcaggaaagtgtaagagagcagcaataatgaaaatttccctgtggaattgctttacgtagctaagatttaaatgagaagcccttgaggtaatctatattatgctggcatgattaggttataacgagggcagaaagcaatattatttgaagacgacgggtcgcgctgatggctataggtaaagtgaacataatgatgacaatacagcataagtttcattttccgtgagtttcaccacaactctctcatcgctgtttaacgatgctagtgtcacttacgcatcgctatctatcagctatttcgctttgagtaaaaatacgccgttttcctatgacggtgaaagatggaaacgtttgctgtttggtctggtttccggcctgatatcgctgtatttgaatcaggacaaattcattatcatcaacagcttcttttatagttttgaaatattaccgatcattttggcgacattttacggcggctggctcagtggtttagtggctttagccattaacattatttttaccggtctgtttacgctggataatatactgattgtcttaatcatatttccgctgctgttatccaaagtgtgggaaagaaagagcaatcgggttttctatctcactatcgcagttattgccgtttaccgtatctgcgtcggcgcgacttttctcaactatggacatttgtggccgtctacattgatttatctggcgtcatctgctttgtgtctggctatttgttttcacgcattgaattttaaagaacgccatattcatgcttattttgctatgaaagagcgagcgaacgtcgataatcttacccgcttaaataaccgcgctagcgttgatttccacttaaagcaattaagtacgttaaggcgcgcctgtgggttattaatactggatctggataaatttaaatcggttaacgataattacggtcacggcgcgggagatttgattctttccagtgtgggtgagattttgaagcaatccgtgagaagtctggattttattggccgcttcgggggcgaggaatttatcattattaccgaaagccaccatccggaaaatatgaaagtgatggcggagcgcattcgagaaaatattcaacagctagaagtgacgttaagcgatggacgcaaagtcaggatcactatttctattggcgtttcgctgtatttaccgggaatgtcgatggtgaaggcgataaaaatggcggacgatgcgctgtatcaggctaaacggcagggacgaaatcaggtggtttatagcaaactgatgccattctctccgttgggagatcgcatcaggggcgttggaaagcgacagccgcggcgtaatagcccgttatagccgatgagtactatcaggtactttttggggatggcacaaaagttaaaggccccgactttcgtcggagcctttagctcgaatatggcggtgagagaggggttcgaaccctcgatacacttacgcgtatacacactttccaggcgtgctccttcagccactcagacacctcaccgtgttgttacagcgttaacactgcaacggggcggtactatagggataggggccttgagggtcaagaagaatttacgtgaaaccattcgcttgcttaattcaccgtcaacttgcggaaataccccgcaaatccgcgttatttttgccagagttccgcttgctgtggcgaatctaccatcacaaaatcggcctgaagcgctttcgctaaattataatcagattgcgaattaatacctattaacatcaatttgctcaatgaattgcgtttaaaacaatgagtcactttttgattccacaccatagtcgctgctgattgccctctacccagcgttaaggtttcaaccacagataccggcgcacgtaattcaaaagcatgatattccagtttctgcgcttccattctgtcgtcaacccgacaatcatcagccattagtacattagccagcgttttacgcgtatggctgcgcggtgcaaatgttctgatctctggccccagctctttgaaaaaccgatgcttggttgaataaactcgggttctgcccgccgcgttgctgtccgtaatgaccgccgagatatattgagccacgcgaccaaagtcttttgtatgatcttttatgtcgataaagaattttgtcgtaggaaatttgtttaatacgctggccagcgtggggatttttattcccaaccctctgaatttgtattctccttcagatttaaatttataacccgcatccagcttttggagctcttcaagggttaattcagccacggtaccttctccatcagttgtggcattcagatttttcgaacggaaaagtacgggaatgttatcgctagtgagttggacgctaatccagataatatccgcatgatgttccagtgcgtgttgaatcgctgttacggtgttttccggcaaatccgctgtaccgccgcgatgagcgacgattaacggtgccgcctgagcggggagcaggctgggcaacagtgtgagggaagagagataaaataacgtgcgtaatttcatgagaatacccctgtccatagagatgttgaaacgcatagcattttgtcgccaagcgatgttttggctcagatgttttagcatggcggaattaggggttggcataatcaaatttaacaggttctatctatttcttattcaacagaacggtagcgaaaagtgattaatcagggaaaagcacagggaatggggaagcgtcaggtttggctggttttagataaaaaaaacggcaatcacattcagtgggaaatcgctttccctactgtggattgccgttcttcttgcggaggactaactgcatcatccggtactcaatatggcggtgagggaggggttcgaaccctcgatacgcttgcgcgtatacacactttccaggcgtgctccttcagccactcagacacctcaccgtattgttgtcgccaacgccaaacgttgtcgaccggcgtaatgtagggaaaaccaagctcagcgtcaaccctcttgtgtattgtttatgactgtttagctaaagttgcatcaatttgctgatttcatcggcatttatttccacaaaaccgtcgcgtcgttgtaaatctctcgcagaaaatatttttgtcagacaaatagatgattatttgtacttttgtgcataattaggcgattaattcgcacaattagtgcttaattatgaggttaacgggctttgttactggagttatagtcaaaaatgtcgctaaataatcggcttgatgggattgaaataccgaacgaaagtacctctgcctgcgcggctatctgagcaaaactacggccagtcgtacttttggtcggaatagtatttttagtcggaagagcacttttagtcgagatagtatctttagtcgaaatagcatctttagtcgaaatagtatctttagtcggattagtattaggggtaaattttggaacagtcagattccgcaccgcagctcagtgatgatctaccgcagccgattccagccggaaccgggactttattcttcatccaaacctttgccacgttaggttttgccgtgctttattccacgctggtgctctatgccaccaagcgtttggggttcagtgagagcaacgccaatgccatcatgggcgtattcggcgcatttaactatgggctgcatttattcggtggttatttgggtgggcgctacctgagcaatcgaaatctatttgtgctgggcatggtactacaggttattggttgctggctgatcgcggtttatggcctgtggggactgtattgggggctggcgatgttcctgaccggcagcggcctgaatgtaacctgcctgaatatgatgctgactcagagatttatgccggatgacgatcgccgcgaatcggctttcctgtggaattacgccggcatgaatttgggtttcttcctcggttttgccgttgccggttatttccaactgagtgaaaactatcgagcactgttcctgtttgccactttgggtaacctactggcgattgtgattactttatctcgctggcacatattgagagacaccaatacgccgctacagcaggccggagcaaagcaggccaaatggcgaatgctggtgggtattttggtgctgattgctttggttcccatcattcgtttgttgctgactcacgccggttttagcagctattttgttatcgccatcggcgtcgctgtttttgtgatgctaggcgtagtcacggctcgccatcatcctcacgtcgagcgccgtcgtatggtggcctacatgttgctggccgcaggctcattggtcttttgggcgttgtaccagttggctccgatggggctgatgttgtttgctgaacataatatcgatttgaacgtttacggctggcgcgtggctccgcaatggattcagaacatcaatacattggtgattgtgatcggtgggccactgatggcgctgtggtttagtcgcttgcgtaaacgcggtttctctattgatgttcctcttcaattttctggtgcgcttttgtgcatggggatgggcatgctggttctgccgctgggaattcaactggcgggaggcgacgggctggtggcgtttaaatggattgcgctgagttatgtactgcaaagtacgggggaattgctgatttcaccgatcggatacgccatgatcggcaaactggctccgccgcgctatcagggcgtaatgatgggatgctggatgatggtgaccggcgtggcatcagttttggcgggctatgtctctggcatgatgccgactaatagcggcagcacgccgatagaaaccaatccgggctacagccatattttcaacatgctgggctggggttctttgctgaccggcgcggtgctaattgtgctgattccgttgttgcgtcgtctgattcaggaagggcaattatctgcgcaaagcaagctgacagcgcaaaaccgttaacccactggcattattcagatttagggcgaaatttctccggtttcgcccttgcatctcaccgctaatcgcggaaatctagggtgacttatgctaggagcctacagatcatgaatattattttttatcacccctttttcgatgcccaactgtggctaacgggcatgaagactcgtttaccgcaggcaaatattcgtcaatggcagcggggtgataaccaaccggcggattatgccctggtatggaatccgcctcacgaaatgctggctaagcgccaacaactgaaaggcctgtttgcgttgggcgcaggcgtggatgccattttggatcacgagcgccgtcaccccgggactttgcctgccggagtgccgttggtgcgactggaagataccggcatggcgttgcagatgcaggaatatgcggtgagtagcgtgctgcgttatttccgccggatggatgagtatcagttgcagcaggagcaaaaactgtggctgcctctgccgcctcatcagcatgataatttcgttgtggggatcatgggggcgggcgtgttgggcaaaagcgtggcacaaaagctggcgggttttggctttaacgtgcgttgctggagccgaacgccaaaacacattgacggcattgaaagctatgccggtggtgcgcaactgggcgattttctcaaagggacgcaattgttgatcaacttgttgccgaatacgccggaaactgtgggcattctcaatggttcgctgttctcccaattgaataagcgggcttatgtgatcaatctggctcgcggcgtgcatttgctggagcgggatctgctggcggcgatgagtgaagggcaagttgcggccgctacgctggacgtttttgccgaagaacctctaccgagtatgcatccattctggacgcatccacgagtgaccattacgccgcatattgccgccattactttacctgaagtggcgatggatcaggtggccgagaatatcaagctgattgaagcgggcaagcaaccgcagggtctggtggatgtggcgcgtggttactgattccagcaggcaaaacatgggtttcagctcggctgcgcgggggattcctgctatgcttagcggactatgttttgcctgacaaactgagaataagaacccgcggagtagttatgtatccagttgatttgcatatgcacacagtcgccagcacccacgcttacagtaccctgcatgattacatcgccgaagcgaaacaaaagaatattcagctgtttgcgattaccgatcacggcccagatatggctgatgctccccactattggcactttatgaatatgaaagtgtggccacgcttggttgatggtgtgggtattctacgcggtattgaagcgaatattaaaaatctggacggggatattgattgcaccggcccgatgctggacgcggtggatctggtgatcgccggtttccatgaaccggtctttccgccgcaggacaaagccgctcatacccaggcaatgattgctgcgatggcgcagggcgatgtgcacattatcagccacccgggaaatccgaagtttccggtcgatattcccgccgttgcggcggcggcagcaaaatatcaggtggcgctggagttgaacaattcatcctttactcattcccgtaaaggcagtgaagccaactgccgcgctattgccgaagcggtgcggaatgcggggggctggctggcgctggggtctgattctcacgtggcattttcgctggggatttttgatcactgcgaacgcataattgctgatgtggggttcccagaagatcgcattttgaacgtaagcccgcgccgtttactgaatttcctcgaactgcgaggccgcccggccattgcggaattagccgatatgtgacatcgtcacgcccaatgttagcgcagaaaaatagttaccgtagtaaatggtcagcgtagtaaaagcgtttgctgcgaaaaacatttaccgccgtagacccatagacaaatggattaggacagttttatgaatgatttttcgctggtttgccgggttttgggttcgctgttttatcgtcaaccacaagatccgctgttagcgccgctgtttactctgattgaacaggggaagctggagcaacattggccgctggagcaaagcgatctgctggcgcgtttgcagcaggaatatcagccgcaggcgctggccgatgattatgccgcgttatttaccggcagtgaatgcagcgtttcgccttttgcttctcaatgggaagacgcgcgtccggaagcagagttacgcgctttcttgcaacaacgcggtatgccgttaaacgacgggccggtagatcactttggctctctgctactggccgcctcctggctggaagatcaggcgcaggaagacgaagttcaggcgcagattgctctgtttgatgatttcctgttcccgtggtgcgggcgtttcctcggtaaagtggaagcccatgcggcgaccggtttttaccgcacgctagcgcagttaactcgcgaagcgcttcaggcgatgcgcgatgagctggcggaagaagaagacgagcccgaggcagaataaaccgtaggtttgcctagcctggacgatcaaaaagcccgccgatcggcgggctggtatgattgttcagtaaacgcaggttttagtcagtaaagggtacgattaacatccccggtttaacttccagtcctttagccagttttttcgccatagcttcggttttacttttgtcagcatctaatacataggccggttgttggtcaaaatacgattttagtgactgattcaaatagggttttaacatactcatcgccgaatccattttttctggttggactttataatcggtcacttccatatctttcaggaaaatagcccctttctcgcgatcgaataccggctgcgctttcagcgtcagctgcatatcggcgttctgcgggccgaggatcgaactgattttcacctgcgcattgccggttagcgtcactttacccggctcggcgcgccctatctggctctgtaattggctcagggtaatatgggcatccaccagccccggcacgccaatctgtttctcgtaatgattgtgtttttgcagatactcgttaatttcttgctcggttagcgtgtactgtgtcagtgggttgcagccggcaatggcaccgacaaaaatcagagcggcagcgccccaaagtagctttctcattatgacctcgttgaaccgcaaatttggctaatagtaaccggttagaccttgggttggaatttgtaaccggtttctgccgttgcaacgccattggtggcgttcagaaataaggctggatagtgcgggagcggggagaaactgccaatcggataactctgtgtccgatgatttaattaaccagacccggttttaggcgcgtttattcctgattctcgaaagtgtccatcagcaaaaaagtgcctgcctgtcgttggtaactgtctatttgcggaaccagacgcctgaaatgctcggttttgcagtgggtatccagcgcgacgcgatccggccattgctcgataaaaatgaaatggccgggatctttttggttgatacacaactcataagcgtgacaaagcggctcctgcaaggtttttcctactcattcccggtatagcggcatgactttatcgatatgttcaggatgaacaaaatcttgcgcaatcactttcaacataggaataactcactgtttaagcctggctatccatttgattcggtcacttgtggcaagattagctgccacttaacattgccggttcgatacgccgttgattaaactgccaatataatccagccagcgtaatcaggccgatgattccgagtaggaaccaagggagctgcggcaaagacaggcttttgcctgtgtcgtacatccagccgccaccggtgtagcctagtgcgccacccaatgccaaacctaaacggctaaagcccatatagctacctctggcacgcgcatctgccagcgaggcgctcagggtttcccgcgctggctcggcaataatggaacccaaatagaagaagcagatcagcattaataatgtttgcaaactgtcggttaacccgatagggaacatgctgatgctcataataaacaggccggtcatcagccgttgttccagacgaaaatgcttttcgctccagcgggcgatcggatacagcaacgtcaatgacagcgcggcttcaatggcatacatccattttaccgccgccggagaaccggccacttcgtttacaacgataggcagcatcaacatcacctggaccgccagcatgtaataaccggtgagcgtcaggacataggtcaggaagcgtttgtcgcgaatcactcgcagcatgccttcccgcattggggtgcgcaccgttgaaatacggtaggcggggagcagccaggcgttccacagcgcggccagcacaaaaataaatgcaccaacccaacacaccagatgaaaatcatactggagcagccaactgcccagcagagcgccgatcactgcaccggcgctatcttgcatcatgagaatagagtaaaaacggccacgttcatgagggcgaaccagtttgatcaccaacgcggtgcgcggcggatcgaacaatgtgccgcccagcgcggacaatgcgcaggcgagccacagaatccacggctgatccgcgatggccatcagggcaaaacccgccgcgcgcagcaacatcccaatcacgatcattggttttgcgccaaaacgatcggcaatggcgccgccgaaaatgccaaggccttgttgaataaactgtctcaatcccagtgcggcaccgacaacaaccgccgcccagcctaattgatcgacaaatcggatggatatcaggggaaacaccacgaaaaaccccagcacgactaataagttatcaaacaataagaagtacttacccaagctgcgcgcttgcgataccagagacatgtttcaccgtcagaaaatagaaagagaggaagggtaattattaccctgatagtttgtacccaaattgatggaagcgatagatggtgagttgataatatttttttatcgtcaatatgttagctagcgggcaaattggtaaaaaaaatcgtttttgcgaattgattgcgcaataactcgtcaatagcggttttacccgcgaccattgcaacggttatattaatcgtcacttttaatgttccgcctgaactaaggggagtcgatgtttggctatcattcagtatcaccaaaagtacgcctgacaaccgatcgtatgtcgctgcgtttggttcatgagcgggatgcgtaccggatggcggagtactacgccgagaatcaggcattccttaaaccttgggagcctgtgcgggatcaaagccactgcgtgccttccggttggcaagcgcggctcagcatgattgccgagatgcataaacagggcagcgcctattattttattctgctcgatccggaagagaatgaggtgcgcggcgtcgccaatttcagcaatgtgatgcgcggttcattccacgcctgtttcctcggctattctcttggcgaacgctggcagggacagggcttaatgtttgaagcgctgcaaccgctgattcgctatatgcagcgacaggaaaaaatgcaccgaatcatggctaactatatgccgcataatcgccgcagtggcgatctgttggccagattgggctttgaacgtgaaggttatgcgaaagattatttgctcatcgatggtcagtggcgcgatcacgtgctgacggcattgaccgatactgaatggaaagcaacgcgctgaggttaggatgaaatacagtttaagcccgttagaagcccgtgtagtgggctgtttgctggaaaaacaggtgacaacaccggagcaatatccaatgtctctaaacggtatcgccaccgcctgtaaccagaaaaccaaccgtgagccggtgatggaactgtccgagagcgaagtgcagcaaacgctcgatctgctaacgaaaaaacacgttattcgtagccaaagtctggtgaatagccgggtaatgaaatatgaacaccgattttgcaactcggagttcggtcatctgaagttttcttccgcggaagtcgcgatagtcaccacattattgctacgcggcgcgcaaacgccgggagagttgcgtacccgcaccaatcgtatgcatgaattcagcgacgtgagtgaggtagaggcaacgctggaaagtcttgctacacgtgaagacgggccttttgtggtgcgtttgccgcgcgaaccaggcaagcgagaaagccgctatatgcatctgtttagcggtgaggttgccgccgcctctgcggacgagctggcaagcgagccggtcaacggcgtgctggaaacccgaattgctcaacttgaatatcaggtagctgaattgactcgccgtttggatgaagtcatgacccagttggatgactaataaggtcactatgaaaaaacttcgcgtgggtatggtggggcttggcggtattgcgcaaaaagcctatttaccgattttaagccgtgccgacgactggacgctggcaggcgctttttcgcccagtcaggccaaggctcagccgctgtgtgaccgctacagaataccgtattttccccggttgaatgagctcgcgacggcctgcgacgcgatttttgttcacagcagcaccgccagccattttcaggtgatcggcgaactgctgcgcgctggcgttcacgtctacgtggataaaccactcgctgaaaccgtggaacaatcggaacagttaattgaactagcggaaaaacagggcaaggcgctgatggttggcttcaatcgccgttttgcgccgctgtatcagcaacttaagctggaaatgaatcagccggcttccctgcgcatggaaaaacaccgacaggatagcgttggcccaaacgggctagggtttaccctgctggatgattatctgcacgtgctggataccgtcctgtggctgggaggcgaaaacgccagcctattgggagggcatatcgccactaatgacgcgggtcagatgctgtatgccgaacatcattttcaggctggaaactgcctgattaccagcagtatgcatcgtcgggcgggaacccagcgggaaagtgttcaggcattgacggaagggcattgctaccagatcaccgatatgcggcgctggcagcaggagtctgccggacagatgattgaaactccggcaccgggctggcaaacaacgttagaacagcgcggcttcgtcggcgcggtacgtcattttatcgattccgtcagccatcaaaccccgccgttgatttccggtgaacaggctattagcgctcagcgaagggtggaaaaaatgctggaaaagcgttgagaagcccgcaaggtggcgagatgcagattgttacaacaagaagtggctattagtcggcggatacgtagactattgtcatactaaaaacccgtcatcgggttgagctgacgcctgctaattgcaggcgttgatatttccagcgtaacgaatcagaaaatatatgaatttacttaaatcactggctgcggtcagttcgatgaccatgttctcgcgcgtgttgggctttgcccgggatgccattgtcgcgcgaatttttggtgccggtatggctaccgatgcattttttgtcgcattcaaattacctaatctgttgcgacgcatttttgctgaaggggcgttctcgcaggctttcgtgccgattctggcagaatacaaaagtcagcagggggaagaggcgacccgcacctttgtggcttatgtttccggcctgttaacgctggtattggcagtggtcacggtattggggatgctggcagcgccttgggtgatttacattactgcccctggttttaccgatacgccggataaatttgctctgacttctgcactgttgcgcattactttcccgtatatcctattgatctcactggcctcgctggtgggggcgatactgaatacctggaaccgtttctccattccggcctttgcaccgacgttattgaacgtcagcatgatcggtttcgctttatttgccgcaccgtatttccatccgccgattttagctttggcctgggctgtcgttttgggtggcgtactccaattgggctatcagctgccgcatttgaagaaaatcggtatgctggtgttgcctcgtctggcgctgcgcgacgctggcgtgtggcgggtgatgcgccagatgggacctgcaattttaggggtttccgttagccagatatccctgatcatcaataccatttttgcttcttttctggtgtctggttcggtttcatggatgtattacgccgatcgcctgatggagtttccttccggcgtgttgggtgtggcgttaggcactattttgttgccatcgctggcgaaaagtttctccagcggcaaccacgatgagtattctcgcctgatggattgggggctgcgcctgtgcttcctgctggctattcccagcgcggtcgccttgggtattttggccaagccgctggtggtttccctgttccagtacggtaaattcaacgcttttgatgcggtaatgacccaacgtgcgctggtggcctattcggttggtttaattgggctaattgtggtgaaggtattggcgcccggcttttattctcgtcaaaacattaaaacgccggtgaaaattgccatcgccacgttgatcatgactcaggtgatgaacctgatgtttatcgggccgctgaagcacgctggtttgtctctgtctattggtttgggcgcctgtctgaacgccagcctgctgtactggcagttgcgtaaacagaaaatcttccagcctcagccgggttgggggatatttatgaccaaactgattgtaggcgtggttgcaatgtccgccgtactgattggtatgctgtggttaatgccagcctgggacgtcggcggaatggcctaccgtctgttacgtctgtttgcggtcgtggtggctggcgtggtggcctactttggcgttctggcgctactcggtttcaaactgcgcgactttgcccgccgggttgcctgataactaaatgggcaaaaatgctcatatcatctctatgtaaagcccgattcttctcggggttacgtgaaatagtcacctccaccctgttagcggtacgctgacagggtgtttttttatatcaaatgagatcaatatctcagttttatttcctgcactacaagttcccgccaaaattcttttatattaattatccccattatttcttagaactatgctagcgaggttggtaattaaagctaatatttttcttattcatgccgataagtgtattaagtcggggtttttgaaagatttgatattttataagaatcttctaaatgatgattttcattaggaatgctgtacacattaatttgacttagtgttgaaggataattgatttatttactggtttaataacattctgattgcgtttaagtctgactagacaacagcgatataaccgtttgcgccctgctgaattcagggttcagtcaatttagaatgaaatatatttacatatatttaactcaaggatgagtagggcaggttatttactaaatagcttgggctatttctcataatggaatctatgataaaaagaatcggactctattttctgctcgtcagtagccccgtccaggcggcgactcagcccgctatggggaattttttaccgctaggtgaaagcgaagcgcgccgctctttgcagaacagcgcccgtgaggttaatgagctaatggaacagcgtcgctaccaacagttgcgccaacctaaggcgattgaagaggacgttattcctgctcaggcggcgttgccggaatccgatcgttgtctggcgataaagggcgtttatttacagggaataacccttttaggaatgggtgaactgaataaactgaccgctttaccttcggattgcattaccagcaatgatatcaatcgcctgactcatgaattaacccgtctctatgttaggcagggttatatcaccgctcgcgtgaattttgttccgctgaatgctgacggcgaattgggcatcaatgttattgagggcgtggtagagaaaatagaagggggcgattattgggtgaatagccgattattattccctgatgttgtaggtaagccgctcaaattgtcgcagcttgatcaaggtttagaccaggccaatcgattgcaatccaatcagacgaaattagatattttgccagggaggagcaccggcggttctattattcgtctaaacaatacgcataaaaagccctggttgctcacaggcacgttggataactatggtcagaaaaataccggagagtggttggtccgtactaccgctagcgtagatagcccatttggtttatctgactttgtcagcatgaatatcagcagcacgatcaaagatgaatcgcggcatcataaccgggcttataccttactttattctttgccctacggagcttggacattcagcagttttgccagttattccgaatacctgaattaccagcgcttaccgcttaataccgtgaaactggatggcaatacccagcagtacggcgggcgcgcagattatatgttttatcgcgaccaggagcagatcgatgccctgaacgttcagctgacctataagaacgtgaataactaccttgagtcttcccgtttaggtatcagcagtaccaccctgacggtattggagttgggtgccaatcatttgcaaattcttccgcgcggcgtgctcagcctaaatgccagcgtagaacggggactcagttggtttggcgcggataaagccagttcgcatcggtcggctaactaccctgatgcccaattcaccaaagcgaaaatgtttgccactctcagccagcgttttagcctgtgggagcagccttaccaactcactcacctgttttacggccagtacagtcgcgatcccttgccgggggtcgaatggctaagcctgaccgatcgcagcgcggtgcgcggttttagccgcaataccctttcggcggataacggctggtatctgcaaaatacattatcacggccgatgacgctcggtaatgccagcttgacgccgcgcataggcgttgacgtagggcgtgttcaagcccatcgcgatgccgttggctggcagagcaatatggggctgagtgccggtgtgtccttcaaatattcgcaggcggtggttgatctggatgtgagccgaggatggctgctttccgatcaaaaaagtcccaccgacccgattcaggtgttagctcgcctgagctacagcttttagctgactttccattcgtcagtattgcagtgcttttacctttcaatgaatggaaatatttggagaaacatggatgaaaaaaagtaagttccgcctttccccctcaggaaagcttgccgcgtcgctggcgattatcattacttcgctaaccgcaactcaggcagcagatattatcggtgcgggcgatgccgggcataatccgggcatcagtcaggcggcaaacggtgcggcggtggtgaatatcgtcaccccgaacgcctcgggcctgtctcataaccaatatcaggatttcaacgttaacaaaccgggggcggtgctgaataacgccttgaacgacggacaatctcagttagccggtcagctgaacgctaaccccaacctgaacggacaggccgctaacgtcattttgaacgaggtcattagccgcaacccatcgttattgctgggtaagcaggaaatattcggtatggcggcagattatgtgctggctaacccgaacggtattgcctgtgatggttgcgggttcatcaacaccaatcgctccgctttagtggtgggaaacccgctgcttgaaaaaggagccttaaccggtttcaacactttcggcaatgacaatactttgagcattcgctccggcggattacaggccaacagcgtgttggatctgatcgcgcccaaaattgacagtcgcgggaaagtgattgccacgcagcaaattaacgcgctcagtgggcacaatcaaactgcagccgacggcagtttagtgcgagcggaggatgtcccgaacagtagtctggacagctactatctcggcagtatgcaggcgggtcgcattcgcttggtgaatactactgtgggcagtggcgtaaatctggccggggaattcaccgggttggaaggcatagacgtaagctctcagggcaatttgggcttacaggcagcgaatctgcgcggtggtgatatcggtctacagggtaaaaacatcgatgctcaaggcgtcgtgaaaaacagcagtacgaatcgcgacggcagtgagaattacaacagcacctggagcggccagtacgtcaatgaccgcagtaccacgcaacgattacagcgtacggtattaaccggcaaaaatatcacgctgaacgccagcgatcgtaaccgactgacggcgacagatattcaaggggataatgtcaccctgcaaggtggtgaactgacgttggacgggcagatgctgacccagactcagggtcatacgcacaatcaggataagcttacctggcggcacaatgtcacgacagaaagcgaacagcgtcagcagatcgggacgtcggtcaaagcccgtgagaacgcgactctgaaggccacggctggtgatattcagttgaaaggcagtagcgtggaagcgggtaacaatctggcactcaacgctaccggcgacattcagctgacggggttggtggagcagaagaaatccaccgaaactggctatcgcaaaaatcacacggccagcttactgacgggaaactggcaggaaagcagcgaaagtgaaagtctgaagaaaagccaactacgagcgggcgataatctggggctaacggccggcaacgcggtggtcagtcgcgcaggcaatgtgcaagccggtaaagatttgctggtcacggcggaaaaggtgcggattgacgtgcagaaaaccgccaatagaaaaactcagaaagataataaaacggcctggggcggaattggcggcggtgataataaagacaatgccaatttacaggaaatcagccaggcttcagaactgacggcgggcggtaaacttttggtgtccggtaatcagggcgtcactattaccggtagtaaagtaaaagggacgcagggcggttttgtgcaaacccaacacggcgatttggtgattgataatgccgtgagtaccactaccgataaagtgaatagccgcaccggaaccgtattcaacatcaccaagggttcacaaaagaccaataactccatgcagcagactgtaggcagtgaactgaaatccgatgcggatttaaaactgttcagccagcaggatattaccgtggtaggcagtttggtgaaaagcgcgggcgagctgggcattgacgctctgggtgatgtcaatgtgaaagcagccgaactgcaacacaaaatcgatgaagagaaaaccgctttaagcctgaaaggccacgcggagaaaaccggagataagcaatatcgcgcgggtgttaatctggatcacactcgcgataccgaaaataccgaacgcagtgaaaacaaatcttcaaccctgagcggggggagcgtgacgttagcatcgggtaaagatgtcactttcactggctctcagctggtcgctcatcacggcgatgccaaagtcagcggcaacaatgtcacctttacagcagcagaagatcaaaccaccagtgaaagcagccacgccaaaaccggcggcggtttctattacgtgggcgggatggataaagccggcagtggtattcaggtggggcatgaaagcagcaaaactcacagcgatggcagcaaagcgctggtttctgggactcaggtcagcggagatttggtgattgcggccaagggcgacctgactcatcagggcacccagcaacagattggtgggaaatatcaggttgatgccgataatgtccacaatctggcggctaaaaatagcgataacagcacaaccacaacgttgaaagtgggcgtagatatcggtgtaaacgccgattatagcgccatcactcgcccgttagagcgcgccggtggcaaggttgccagcctggatgctggcggtacgcttaatgatatcggcggaataggtgcgccgaacgttgggattgatgttaacgccagcggtagcagcagtgatgtgcgtaaaaacagcgagcaagcggtagtgaatacggtgaatgccggtgatatttccatcaatgcagggggagcaatccgcgatcagggaacgcaatacaaagctaatcagggcggcgtcaccttggatgcagaaagccatagccacgaagctgcggtgaatcgcgatcagaccgttagtcgtgaaacgaatggcagcgccggcgtgcgggtttacaccacgaccggtagcgatgtggtcgtggatgctaaaggtcagggagggacgactcgcagcgataaaatcaatgagcaagccgttgccggtggcatcagcgcggtagacggtatcacgattcgggttaaagacgacgcgcgctataccggaaccgctctcgacgctggaaaaggtaaagtcaacgtcactgccggtggcgatatagcttttgaacaggcgaccgaccgcgaaaccgaaaatcatagcggcttcaacgtgaaggcttctggcaaaggtggtttcaccgcagatagcaaaagcttcggcggcggtttgggcggtgactatgacaaaggggaaagcaagacgtctcacgctaacgtgagccaattacagggcttgcaaggcgtagaattgaatgccggacaggatttaacgctgcaaggcagtgaaatcggcagcaaagatcggccggtgggcgatgtcacgctgaacgggaataaagttgatttgcaggccgcacagtccagccattgggagaaaagcactaagttctccggcaatctggacgccggtggcagcaaaggggaaaccgataaaaaaaccagcgctggcggtaacttcggctttgccgcagattacgccaaagtcgatcaatcgaccaacgacgctcaaggcggtggtatcactagcagcggcaacctgaatattcaggccaacggtgataatgagcaagccattcacctggaaggtacgcaggtgagcagcaaaaataccgttttgaatgcggataatggtggaattgtgctggaatctgctaaaagcggagagcacaaagataactggaatctgggaggcaaagccaacggtaaactcggccaaagtttcggtaaagatgagcagggcgcggtagacagcgccagcgggaagaaaacccacacggcgggcgtcggcgcgaccttcggtctcgatcgtaaacaggcaggcactcagcaaaatacccagattgcgaccggcgatctgagcttctccagcgatgcggatacggttctggccggcgcgaaagtcaaagcggataaagtggacggcagcgtgggcggcgatttgcgtattgaaagccgcagagacaccgaacaaagtctgaaagttggcgttgacgttggattaagtcataccaacgatccgaacagcagcgtggtttccaaagtctctaaagtcggtacgccacgttacgcggataaagtaaaagaaacgctggaaggcggcgcgaacaaagtcttcgataaagccgaggagaaatataaccaaaccgctcgcggtctggacagcaaacaagataccaccaacggcgtcagcttcagtaaagccgaggataaagtgaccttgccggaaacgctcgccaatgagaaagagggcagcgcgctgtgggataaaggtgcacgtaaagcgggcaatgtggccaaagagagtcttttaggcccggcaggccgtgatgggcactttaaggttaccgccgatgtggtgaaaaacgatgccgttggtgaacaaactgcgctaagtggcaagcagggcgtgaacctgaccgtacaaggtaaaactcagctgatcggcggccagatcggtagccagaaagggcaagttgacctgaacagcggcggtcttgagcaaagtgatatgaatggcaaacgctatcacggcggcggcagcgccgatgtggcagccaccgtaggcagcctgttgagcggcagcaccaaagatattctttctggggattcaccgttcattaaagtggataaagggacgaccgaggttagcgatgctcgcggcgcgattatcagccataaaacggttaaataagcgggagcgataagaggttattctttttagatcaaataaataatagcccacgctaacggagttattcgttaagtgggctattttctcttacatgatcacatgatcaatcgttacatcaccaattttccgcagacaatcaatgcccgcgcaccatcggttttacatccgttctaccgtttcaatacccaaagtatccaaaccttgcttcagcgtcttggcggttagcatcgccagtttcaggcggctttgacggctttcttcgctatcggcgttcagaatctggcagtgctcgtagaagctagagaacaaaccggccacatcgtacagataggcacacataacgtgcggagtgccttcgcgggcgacgttagtaatggtttcttcgaattgaagcaaacgggttgccagtgcggcttcgcggtcttcggtgatgactaacggcagcgtcaggctgctcgcgtctaccacaccagcgcgtttaaacactgaaactacgcgggtataagcatattgcatgtaaggcgcggtattgccgtccaatgccagcatattatcccagtcgaagacgtaatcggtagtccggcttttcgacaggtcggcgtatttcaccgcgccgataccgaccgcatttaccacttcggccagttcatccgcaggcatatccgggtttttctccgcgatcagcttacctgcgcgttcgatagcttcgtccaacagttcagacagcttaacggtgccgccagagcgggttttgaatggtttgccatctttgcccagcatcatgccgaacatatggtgttctaacggcacggattctggaacataaccggctttacgcacgatggtccaggcttgcattaaatgctgatgctgccgggaatcgatgtaatacagcacccggtcggcacccagcgtttcgtaacgatatttggcacaggcgatatctgtggtggtgtaaaggtagccgccatcctttttctggataatgacgcccataggctcgccttctttatttttgtattcatcgaggaatacaacggtagcgccttcgctctcaaccgccagacctttcgcttttagatcggccacaatgcccggcagcattgagttgtacagactttcacccatgacgtcgtctttggtcagagtgacattcagacgatcgtaggaaatctggttttgcgtcatggtgatatccaccaatttacgccacatggcgcggcaatattcatccccgccctgcagttttacgacgtaagcgcgagcgcgagccgcaaattcttcgtcttcatcgtaatttttcttcgcttcgcgatagaaagcttccagatctgacagacccatatcgctggcgttctcattctgcattttttccagataggcgatcagcatcccgaattgggtgccccaatctccgacgtggttagcgcgaatgacattgtgacccaaaaattcaagcgttcgcgcggcggcgtcaccgataatggtggagcgtaggtgacccacatgcatttctttcgctacgtttggcgcagaatagtcgataaccacggtctgaggctcaaccggagcaatccccagttttggcgcagtcagggcaaactcgactttctcggcaacccattggcggtcgaggaagatgttgataaaaccggggccggcgatctcgactttgctggcgataccctcaagatccagcagctcaaccactttttcagccagttgtcggggttgcataccgagttttttggcaacggccatcacgccatttgcttgataatcgccaaattgggcctttgcggactggcgaacttgcgcttcgctgtcgacgggggcacctgctgcaatcagcgcctggctgactttatctgaaagaagagcctgaatattcaccgggttaccttaattacggacatgaggcgcaaaaatgcgccctgttaatatcaacgggtctggcgtcacgcacgcggtttctctacgcgggagggccaaccacaaaactgctgggtttatatcatatttgcccgccgacgtcagcagggggaaagccttccgcttgtgctatctcagcgctatgttcctaacgaacaaaaacagtgcttttatcggttatttcaacagcaatagcggagattcatcgacaaaactctgttgttcgccgctgaaaacggtaaattatggccgattcgctttcccccccgatgaacggagagaaaaccttatgcaagccttggcacacattaccgaattacaggatttggtacaggatttaccccgttttgaacaacagctgacggattttgcgcaacggctcaatttggacctcagccagttcaccgccgaccacatttctctacgctgtcaccaggccgctacagccgatcgctggcgcagcggtttgcttcagtgcggtagcctgatgtcagaaaatcttatcaatggccgccctatctgcctgtttgatttagcgctgccgttgtccgttgggccttggggaattgattgcgtagaattgccttatccgggaaataagcgttatccccatgaaggctgggagcatattgaactggtattggccggcaccccggaaacgctgtactcgcgggcgttgagcctgctaccggcagagtctgacctaccggtaggcgtgaccttcaaattcagttcgccaaaaggggaagccgaacgtttggctaaccccacgctggcggtaagcaacggcgcgattaccattaagttccatccctatacattaaggcaaattattgacagtgagcacaatagttaacgtgtttaggttatttatctcgctcaggattatcacttatggttatcactgtgactgacctctagtcattattttgaattgaatgccatagtaaggctttcggcagtcttgatgagatgacctttgggcttgagtgataagttctgcatccaatctatcagacggcggaatgattgatttacgggtggtgaaatgagctgtagcagatgtgtttgtcaaaaggggagagataatgactaagttagaaatttgttgctatagcgtcgattgcgcgcagaccgctgagcgcgctggagccgatagaattgagttgtgctcaggtcagtctgaaggcggcctgacgccaagtttgggcgcgctgatgcaagcgcgtgccacggtaaccattccggtccacccgatagtccggccgcgcggtggtgatttctgctatagcgagagtgattttgcgatcatgaaaaatgatatcgcacaaattcgggatatggggtttgccggagttgtcgtcggcgtactggatgaagaagggcacattgatttgccgcgaatgcgtgaaatcatggagatcagcggcccgctggcggtcactttccatcgggcatttgatatgtgtctgaatccgatggtggcgttggaacagttaacgcagttgggcgtggcgcggattttgacctccggccaacagcaaaatgccgagttggggttaaccttactgcgcgatctggtgaacgcgacccaggggccgattattatggccggtgccggtgtgcgcttgtcaaatatgcagaaattcttagaaattggcgtcacggaattacacagttccgcaggccgcacacgtccttccaccatgcgttaccgtaaagccggtgtcactatgtgtgcagataacgatgtggatgaatttgctcgctattgcgtggatgaagaagtggtggaggcgatgaaaagcctgttatgtattaccgaaccgctgccacgttccgcctgatagtcctaaataaaaaagccccgacgcgtgatgttcggggctttttttatgccggaagagagccgattgtgattaaggcttacgggcaatcagtaccgctcgcatcggtgccggatagccttcaacggtcttgctgctgtcgttgggatcgaggaattcagccagtgactcgctagtcatccaatcggtacgacgctgctcgtcggtggttgtgagcgccacgtcggcgattctcacatcgacaaaaccgcatttttccagccagcctttcagcgccagcgctgacgggatgaaatacacgttgcgcatttgcgcgtaacgatcgcccggcaccagaacctgctggctatcgccttcgactacgatggtttccagcaccaattcgccgtcgctgactaactgatttttcaactgatataagtgatctaacggtgaacgacggtggtacagcacgcccatagagaaaacggtgtcaaaggccgccagctccggcaattgctcaatgcctagcggcagcagatgggcgcgctgatcgccacccagcagttttcgtaccgcttcgaactgacataaaaacagctgcattgggtcaatgcctacggccaaatgcgcgccttcgccgatcatgcgccacatgtgatagccgctgccgcagccgacatcaagaatcgttcgacctgccagcgggctgatatggggcagaacgcgatcccatttccagtctgatcgccattcggtatcgatatccagcccgtataatgaaaacgggcctttgcgccacggcatcagcgcgcgcagcattttttccatgccctcgcgctgaccggctgacagcggcggggtgatgtccgcgcgcacgccgtctttcaaattcagttcggtaggtgtcaacagcggcagatgctcaacggcgttaaaccaggttttgaacttaccgtgcagggattcacgctgccagcagcttagctgcgccggcagggtttccagccacgggctaagtggccctttggcaatcagtcggtaaaaatcaccgaattcaatcattgggcttctcctgctttcagagcaatcaacgaaccaaaattaaagcactggaaccatacttcggcgtgttcaaaaccggcgcggcgtaaacgcgctttatgggtttccaccgaatcggtcagcataacgttttccaacatgctgcgtttttggctgatttccagctcgctgtagccgttcgcccgtttaaaatcgtggtgcatgttaaacagcagatcgccgacgttggcatcttcaaaactgaatttttccgataacaccagtgcaccaccgggacgcagccccgcgtacacctgattcagcaagcgctggcgattggctggctccaggaattgcagagtgaaattcagcacgaccattgaggcgttttccagtttcacatccagaatatccgcctcgaccacttccaccggggtatcggcgcggaaagcgtctaaatggcgacggcagcgttcaaccatggcaggggaattgtccacggcaatgattttacagccgggaacctgaatattacgacgcatggccaaggttgccgcgcccaaagaacagcccagatcgtaaacctgactatcaggttgtacaaagcgctcagtcaacatgccaatcatcgaaataatattggaataaccgggtaccgaacgctggatcatatcggggaaaacctccgcgacgcgttcgtcgaaagtccaatcacccaatttggcaatgggcgcagaaaacaggctatcccgcggcggttgcgtggattctgtgtgcggctggcttgccggcatagcatcagttgctggtttggtatcgcgatttggcatgacggtcattgagattgctggaaaatgaaggcgcgtattctaacagaaacgaccggtttttgctaaaaccggttaaacctgagtgacaggaaaatttgtccttgataatttaaagggattggtcgcttactcctggttattccgtggctatagcggcctgagtcgctgctatatgggttcggttatcgttgaatatataaccggtggatttaacagcaaccagtgatgtctggtgttattatccgttgcgggaataattcagggatggatgatgagaaagattatctttttaatcggcttagtggtggtggttttgagcagctatgtactgcgctatatgccgctttacctggtattcatgctttttatttgcttgataatttatggcgcaggtatctaccttaaccccagattaacgacctcaaactggcaccttgggcagaaatgtcagatcaatggtgcgacggcggtctctttgagcgtcttatttttaatcttagtgacgtgtagttcaaccatcggctgggcttattatatgtcgaccaagccttggtatcaggaagatagcaacggctatcagacgcatacgctgtccgccactagccggaaaattgcccaggtgcataatgcggtattgaagaaagtcaaacatccagaacgagctgaattcctcggagattatatcagtccctccgaggggttaggagtgatttgcggctacctgaactatcaggatcccgcaggtgaagacgatgattattatcgctatgtttccaatggcacaccatccggcacctttttacagctgcaaaccgaaagtttttccgcggtgtggacccaattctgtttggataaaaactgaaaatagaatcgtggttgaccgcatgaaagcgtgtctgaacagcgggagggaaagaggcggggtaacacgggaaggggaaaaccggataagctaaggtgagaaagctggaacatgaaggcggtgataaaccgcccgaactaactgtggttccgataaaagaacgcataaacagtgaaaccggggattaagttaagctaaaaatctgttcccacggtaaatagtagatattagcgattatcattagtatcaatgaaacataagttgcactcatccctgaacgtcgccagcgaatttcccggtgacgtaacccgtaatagtgtaataaacgaccgacaatcagcattaatccacacagatgaatcatccaggtctctgcgccgttcatttccatcataaccagcaataccacggcgatcggaatatattctacggcattgccgtgtacccgtatggccgtttgcaactcataaaacccaccgtcgccataggctacccggtactggtttcttaatctcaccacatcaaatgaaagcttaattagtaatagtgcgcccaacacaacataaagcgagctaaccatttttaactccatagcccaaccataactggctgaataatgataaccgtcaacgtcgtcactgtcgctagaaaaatcgaaagtctactatctataatcgctgttgtttatagagtagaaataaatacctgccaccattcagccttgcattttgtcgaaatgagcgtcagttctcatttttcaccgatttctggcgtttctactcttttaaatgtgcgacttctcgccgcccttcattttgatgcaaatcatgacaaactgccgggattggacaagggaattttctgctaaaacaatgtgttttgctctggccaatccggcgcgggaggtaaagaaggtattaacgccgctagccgttgccagattttttgcgcttgctgcggtgaatcgccattatccggcgtatgaataaacagataaggctggtgctgatgctcccataccggcagtttttgcagccagggggcgaaaagtttcagattttcatccagcctatcgccgccgataaaccgcaccagaggttgatgaccggtaaccacggcatgtaccggcagtttgggttttttactttgcgcgtcccgcaccgcggcggtattgggtgcggcgctgtggatcggacggctatcgagaataacccggttaacttgccgttggtgcaaaccttgattgagcgccagttcctccccgcctttggcaaaaaaagccggatgccgaacctccacaccatagttaaagtcacggggtaatcggtcgagaaagtgaaacagccgcggcaattcacgcggcccaaaggcggcgggcaattgcagccacagttggccgatacgctgattgagcggttccaacgtctgataaaaggttaataattcctgctcgcactgactgagtgccgcctgatggctgatagtggcggggaatttgaagcagaaccgaaagctttccggtgtcatatcccgccagcgcagcacaatttccggtttcggcagcgcataaaaagtggtgttgccttccacgcagttgaaatagcggctgtaatccgccagatcctgcaaacctaaccggctccatgccgaatgttgccattgaggtaatccaatatacataagtcagccgctgcgaaagaaagaaacaacgcggctcagctcacaaacgaagccgctaaaaggtacccttaccttaacgtcaggcggttagcgcggcaataatttcattgctgctacggacgcgagaaaaacgcgggaagatgtggtggaagctggcctgatgctgctcggtgtccggagcgctacaggcgtcttcggcgatcaccagctcgtagccgtgttcccaggcggagcgggcggtagattcaacgccgagatttgtcgcaatcccgcccaacacgatggtttttatcccgcgccggcgcagttgcagatccagttcagtgccgtaaaaagccccccattggcgtttagtcaccagaatatcgctatcgcgaaccttcaactgcggcgggaaatcccaccagttggcaggtaaacggccagccgggtttgggcgatcgaccggcggatgcaatacgtcggcaaaatctcccgaccagcccacgcgcacccaaaacaccggagcgcctaattgacgaaactgttcggctaggtgtgcaccatgattgacaacttgttcggcactgtacgggccgccggcgtaagggagaattccctgttgcaggtcgatcagcaccagtgcgctggtttttgcttcaattttcatcatctttggcctcgaacagacatgggctaaatgaggtttatggcctctggtgcctccgagtttatgccaacaaatgttgccgaacagtcttatcacggggagaattttgttaaatgatgtgttaaatcaccgcagagagtgactttgtcgtccctgacctgtgcgttcgctcttatctatgccatgaatttcctttataatgacccccttttttcaacactctttaatccaaaatacctatgccaatttatgaatatgcgtgtagcgcgtgccaacatcgattagagaaactacaaaaattttctgatgcgccactgacagactgtccggcgtgtgggaagcctgcgttatcgaaacagatatctgctgccggttttcagctgaaaggcaccggttggtacgccactgatttcaaaccgggtgccaaaaaacagggttcaccagagtaagggttcaccagaataatagccgcgcgaacagttcagaacactcgacgggcgcggcatcggctgagtaaaaggacattgtatgcgtactgagtattgcgggcagttgaatctgtcccacgtgggacaaagcgtcacactttgtggttgggtcaatcgtcgccgtgacctgggtggcctgatttttattgatatgcgtgaccgtgacggcatcgttcaggtgttcttcgatcctgaccataaagcggcctttgagcaggcttctgagctgcgcaatgagttctgcattcagattaccggtactgtgcgtgcgcgtccggaaagtcagatcaataaagatatgtctaccggtgaagtggaaatctttgccaactcactgaatattatcaaccgttctgagccattgccgctggactccaaccagatcaacagcgaagaacagcgtttgaaatatcgctatttggatctgcgtcgtccagaaatggccgaccgcctgaaaacccgcgctaaaatcaccagctttgtgcgccgctttatggacgatcacggtttccttgatatcgaaaccccgatgctgaccaaggcgacgccggaaggtgcgcgtgattatctggtaccaagccgggtacataaaggcaaattttacgcgttgccgcagtctcctcagctgttcaaacagttgctgatgatgtctggcttcgaccgttactatcagatcgtaaaatgtttccgtgacgaagatttgcgcgccgatcgccagccagaatttacccagatcgatgtggaaacttcctttatgagcgccgatcaagtgcgtgaaatcatggaaaaaatgattcgtcagctgtggcaaaccaccaaaggcgttgatctgggtgatttcccgatcatgacttttgcggaagccatgcgccgcttcggttcagataaaccggatctgcgtaacccgttggagctggtggacgttgccgacttagtgaaagacgttgaattcaaagtgttctccggcccggcgaacgatgcgaaaggccgcgttgctgctattcgtgtacctggtggcgcgcaactgactcgtaaacagatcgacgaatacggccagtttgtcggtatctacggcgcaaaaggtctggcgtggttgaaagtcaatgaccgtgctgccggtatggaaggggtgcaaagcccgattgccaaattccttagtccggaagtgttggaggccattctggctcgcactcaggctgaaagcggcgatattctgttcttcggcgcagacagcttcaaaatcgtcaccgatgctatgggcgcactgcgtctgaagctgggccgcgatctggaactgactaagctggatagctgggagccgctgtgggtggttgatttccccatgtttgaagacgatagcgaaggcggtctgacggcgatgcatcacccgttcaccgcgccgaaggacatgacgccagaagcgctggcagcgaacccgacttctgctatcgctaacgcctacgatatggtgattaacggttatgaagtcggcggcggttccgtgcgtatccaccgcaccgaaatgcagcagcaggtctttggcattctgggcatcaatgaacacgaacagcgtgagaagttcggcttcttgctggatgcgttgaaattcggtactccaccgcacgccggtttggcctttggtctggatcgtctggtgatgctgctgaccggtactgataacatccgcgacgtgattgcgttccctaaaactaccgccgcggcctgtctgatgaccgacgcgccgagttttgccaacccggcctctttgcaagagctatcgatcagcgtcgtagcgaagaaaaccgcagccgatactccggcagaagagaaagagtaatgaaatacaaacgccccgagtcaattttggcgctgatctatgcccaatctacgggtcgggtgctgatgttacagcggcgtgatgaccctgaattctggcagtcggttaccggcagtctggaggagggggaatccccattgtctgccgcgcagcgtgaagtaaaggaagaagtgggcattgatatcacaggtgaaaacctgacgctgctcgactgtcagcgctgcgtggagtttgaactcttcgcgcatttccgtcctcgctatgcaccgggtactacgcataataaagaacactggttctgtctggcgttacccgaagagcgtgatgtcaaacttaccgaacatcatgcgtaccagtggcttaactcgccggaagcggcggcattgactaagtcctggagtaataagcaagcgattgaagagtttgttatttattaggtctaattaggctattttcggagattcttatggcaggtcatagtaagtgggccaacactaaacaccgcaaagcggcgcaggatgccaaacgcggtaagattttcaccaaaattatccgtgaactggttacggctgccaaattaggcggtggcgatccggctgctaacccacgtttacgtgcggctatcgataaggcattgtccaataacatgacgcgcgacaccctaaaccgggctatcgcacgcggcgtgggcggtgacgaagataacaacatggaaaccatcatttatgaaggttatggtccgggcggcaccgcggtaatggttgaatgcctaagtgacaaccgtaaccgtaccgtatctgaagttcgccacgcctttaccaaaaccggtggcaacctgggcactgatggttccgtttcttacctgttcaccaaaaaaggcgtgatttcttacgccccaggtctggatgaagataccgtgatggacgcggcgctggaagccggtgccgatgatgtgaccgtgtatgacgatggtgctattgacgtgttcactgcgtgggaatctctgggtcaggtaaaagacgcgctggatgcggctggtctggtggctgaatcggcggaagtgtcgctgatcccatcaactaaagccgatttggatgcagagactgcgccaaaactgctgcgtttgatcgatatgctggaagattctgacgacgtgcaagaggtttaccataacggtgagatctccgacgaagtcgctgctacgctgtaatgagcggcaatcagcgtgatttcatgtaagtcatcgcggcaacagcgttaaagcagtaaagtcgccgtgctcattattgggcacggcctatttttaggtgggtgtggttcccaacgataacggacaaggtgaaaactggtatggcgatcgtattaggtatcgatcccggttctcgtgtcaccggttatggcgttatccgccaggaagggcgccaactgacctacctgggcagtggttgtatccgaaccgtggtggacgatttaccgacccggttgaaattgatttacgccggtgtgactgaaatcattactcagtttcacccggacttttttgctattgaacaggtgtttatggcaaaaaacgctgattcggcgttgaagctagggcaggcaagaggcgcggccatcgtcgcggcggtcaatctggatctgccggtgtctgagtacgcggcaagacaggtgaaacaaacggttgttggcaccggcgcggcagagaaaagccaggtacaacatatggtgcgttcattactgaagttaccggctaatccgcaggccgatgccgccgatgccttggcgattgcgattacccactgccatctcagccagaatacggtgcgattgggtaataaccaattggtcatggcacgtggccgtttgcgttaattttgtgcaacggcgcgcaaagacccgataaagccgggttaatcgctgaaggctggatatccatccagccttttttatgttataaacagctataaaatatattcatcgataaacctgccgggcaaggagacagtcaaggtgatagggcgcatcagaggtatcattctggaaaagcagccgccgctggtgctgctagagaccaacggcgttggctatgaaatccaactgccaatgacctgtttttatgaactgccggagatcgggcaggaagccattatctttactcagtttatcgtgcgggaagacgcgcagttactctatggtttcaatgataaacaggaacgtgcgttattccgtgaactgattaaggtcaacggcgttgggccaaagctggcgctggcgattctgtccggtatgtcggcgcagcagtttgtcggtgccgttgaacgtgaagatatcactacgttggtaaaactgccgggcgtaggaaagaaaaccgccgagcgtttagtggtggaaatgaaagaccgcttcaaaggcttgaacggcgatctgtttaataacaccggtgagatcccgttgcctaccacctcggcgcaggtttctgcggcagacacggaggcagaggccgtttcagcgctggtggcgttgggatacaaaccccaggaagccagccgtttggtcagcaaaattgccaagcccggcgcagactgtgaaacactaattcgtgacgcgttgcgcgcagccttatagtagtgacagcaagaggtagaggatgattgaagcagaccgcctgatttcggctggcgttatcagtgaagaagagatcattgaccgagcgattcgccccaagctattaagcgaatatgtcgggcaaccccatgtccgcgagcagatggaaatctttattcaggcggcgaaacagcgcggtgatgcgctggatcatttgctgatatttggccctccgggtctgggtaaaactacgctggctaatattgtggctaacgagatgggcgtgaatctgcgtaccacttccggcccggtactggaaaaagctggcgatctggcggcgatgctgaccaaccttgagcctcatgacgtactgtttattgatgaaattcatcgcctatctccggtagtcgaagagattctttacccggcgatggaagattatcagttggacataatgatcggtgaggggccagcggcgcgttctatcaagctggatttgccgccctttactttgattggtgccacgacgcgtgccggatctctgacttcaccgttgcgggatcgctttgggattgtgcagcggctggagttttatcaggttgcggatctggagcatattgtcagccgtagcgcccaatgcctgggattggaattaacgccggaaggtgctcatcagctggcgcgtcgatcacggggcacgccgcggattaccaatcgcctgctacgacgggttcgggacttcgccgaagtgaaagccgacggtgccattaatggtgatgtggcgatgaaagccttggatatgctgaatgtggatgcggaaggctttgattacatggaccgtaagctattgctggcagtgattgataagtttatgggtggcccggtagggttagataatctggcggcggctatcggggaggagcgtgaaaccattgaagacgtgctggaaccctatctgattcagcaaggttttatccaacgcactccgcgtgggcgtattgccacgcatcatgcctacaagcattttggtatcgatcgagaagagtaatgttgtaagcggcggagtctgcctgaatgagacaactccgccgaatgactgtgcctgaattaggttttaaaccgtggctttctcggctactggcgtattcaccattcggttcaaccatggaatcatcagccccatcacgactgcaatccccagcgtagtcaaaccgatcttaccgaacacatcggtatagataggcaaggtttccaatgggtcggtaatgccttccggcgtcgcggtgaaggtcgcaacgtagcccccaatcaggaaggatgctgcctgtgtcaggaaccacatccccagaataaagcccatcaaatactgaggcactaacgctgctaccatcgccagacccaaggcgctaatcattaattccccgatactctggaatagataaaccagaacgataaaccaaggtgatgtcaggccctgggcatcggcaaaccacataccggctgccgcagcggtcaaaaatcccagcgagcataagaacatgcccaaagtgaatttggctggcatagtcaaatctcgtcctttactaccaaaacgagtgtagaggctggcgagaatagggctggcaacgaccacccaaaacggattgagtgcctggaagctgactggattaatggcaaaacccagtatttcgtgatgaacgttattaattgcgaagaaatttagcgaggttggcatctgcgcgtacagcacgtagaaaacaatagcttccaacatcaaaatgaaggcaacaaacatcttattgcgccccaatgtatcctgcttgaatgcttctttgaagaaaataaaaaccaccactaatgacagcacgattaacaccagattggcgatcatgacgtgattcatcagccaggcacaaacaaataccataatgaccgtaccggccagcaccagaaacaggtttttccagtttagcggctgggcgtccggctcggatcctatatggcgaaccatatgacggcagcagaaataaaccagcagagcaaagatcagaccgataccgcacagatagtaagtgacagtgtaaccatagcgttcggcgataattggggctaacgacagagaaagcaacgaacctacgttaattgacatataaaacagggtaaaagcaccgtccaagcgaggatcttttggcgggtagcacttggataataagctagctggattagctttaaataaaccattcccaacagcaataatccctagggcgataaaaatcagattaggccggtacaaggataaaccggtagcgaaataaccaatggccagcaccactgcacccagcaccatggtgcgcttggttcccagtaaatgatcgccgacgtagccaccgatggaaatcaggccataaaccaaagcggcaaaagccccgaaagtcacaaatgcctgttcttgtgagaagcccagctgtttaacaaagaaaaccgcgagaatgccctgcacgccgtagtagccaaacctttcccacagttcgacaaagaagatcataaagaagggtttgggctgctgtaataaaccggttggtgtgggtttatccatgatggtttgcctctgaataatagttatgagtgggtagggcgcgcacaaatccgtcccggcgcgataaagaaagccgaatagaatagtgaaaatgttttctcaaaaagcaacgacggcagagtattacactgggtgaatattatgtttgtggctgatcacactaattaaaacttactgagtggtttttgtatccgacatgtttatttcgtacagaatgttatcaaattcaaaaaaatataactgaaataacaacggcgtaagcggttgcgcccaaaggctatttgggagggaaaggtgaatatcagcaaaatgcgggataaataagcaggcgaaataagaaacaggaagtataaagcaggaggtaagaggaaaagtataagaggtcagaagtccaaatcaacgcacggagggagctgcgaacttgctccctccgcagagctttatcctctgggtttttgcgacaggcttagcacaaacatcattgcggcgcagagcaccacggatgggccagctggcgtatcgtacagcgcagagaaggtcaggccgccggttacagcgagaatgccaatcaccacggcgaccccggccatttgctccggcgttcgggcaaaacgacgggcggcggcggcgggaatgatgagcaatgacgtgatgatcagtgcgccaacaaatttcattgataaaccaatggtcaacgcggtaattagcatcaacagcattttgacccgctgtaggttaaccccgtcaacgtgtgccagctccgggctaatggtcatcgataacagcggccgccactgccagcgtagcaccagcaataccacggcgacgccgatggcaatcatccagatatcattgagggtaactgaaagcaggtcgccaaacagataggccatcaggtcgacccgcacatttgacattaggctgacgacgactagaccgagcgacaatgcgctgtgcgccatgatgcccagtaaggtatcgacggccaactgcgggcgacgttcgagccacacgagaaccagagccaatatcagcgtcatggcgatcaccgcgtaaaacgggttcacattcagcagcaggccaaatgccacgccgagcagcgaggcgtgagccaaagtatcgccgaaataagacattcgacgccagaccacaaacgaccccagcgggccagcggcgcaggccagcaggacacccgctaaccagccgggtaagagtaattcgatcatgcgtcacggctccctgggttttttagaataattttgccatgcaaatcgtgacgatgattatggtgatgacggtaaacggccagtttttcggcaccgcggttgccaaacatggcgatgaattctggatgggtagaaaccacttctggcgctccggaacagcaaatatgttgattaaggcataatacttcgtcggttttcgccataaccagatgcagatcgtgggacaccatcagtacgccgcagcccaattcggtacgcagttgttcaatcagatcgtacagtgccagctgcccgttgacatcgacaccttgtgtcggttcatcaagcaccagcaactgcggcttattcaacaaggctctggctagcagtacccgctgattttcccctccggacagtttctgcatgggctgttctaataaatgggcagcatggacgcgtttcagcgccggtaaaatatccgcttgcttcacgccgggcttaaggcgcataaaacggctcaccgtcagcggtagagtggcgtccagatgtaatttttgtggcacatagccaatacgtaatccaggctcccgaaccacggaaccgccggtaggggcgatcaatcccagcaccacacgaaccagcgtcgattttcccgcgccgtttggcccaagcaaagtgaggattcttcccggctgtaatgagagggaaatatcagcgagtacccgccgattcccgaaggtaacggatattttgttcagacttaccaatgtggacatgatgattacgtttgcagaattaagtgaatgttataatattacgcttttccagcggaaaggacgagttaacttaccatgttcaagagaaataacgttatgttacaaaaaaaccaatggctacgaagaaccctattagccagcgccgttttgatggcaggtgtggtacatagcgcatcagcagcggtagtcacctccatccgtccgttgggatttattgcggcttctatcgctgacggcgtgctgccaacggaggttttactgcccgacggcgcttcgccacacgattatgcccttcgtctgtccgatgtccagcgtttacgtcaggctgagctggtaatttgggtgggaccggaaatggaggcctttctgataaagccattgacgcaagtccctgccagcaaacagattgctgtttctcaattgactcaggttgcagcgcttttaatgaaaggcgacgagcatgatgaacatgaaggtgagcatgacacgcatcatgatgatcatgcagcgaataatgatgaacctggacatcaccacggtaagtacaacatgcatgtttggctttcgccagagatcgctaagttgacggcaattgctattcacgaccgattattggaacttatgccacaaaatcgggacaaactagatgcaaacctgcgccgattcgaggatcaactagcgcaaagtgacaaaaaaattgctaatatgctgaagcctgtgcagggtaagggatattttgtttttcatgatgcctatggctactttgaaaaacactttggcttggccccattgggtcactttacagtcaaccccgaaatacagcccggcgcacagcgtttacttcaaattcgaacacagttggttgagcaaaaggcggtatgcgtttttgctgagccacaattcaggccggccgtcattaatgccgttgccaagggaactcaggtgcgttcaggcacgctggatccattgggtagcggcatcgcattgggcaaagacagctacacagagtttctgtctcagttgtctgaccaatacgagagctgcctgaagtaagacttataaggatactcataagtgcagcagatagtccgaactatcgctctggcgtataacaacttaccgcggccccatcgagtgatgttggggtcgttgaccgtaatgaccttggccgttgccgtttggcggccatttgtttatcacccagaacacgatcccatcgcgaagagcgttattcttgataccagccaggcgaacattttggctccagaagccagtgagccgctagaccaaccgagtccggacgatgagattcctcaggacgagctggacgctaaagatgttaatgaaagtggcgttcatgaatatgtggtttccaccggcgatacccttggcaatattctgactcagtacggcatcgagatgtccgatgtggcgttactggcttcgcaaaaccgcgacctgcgtaatctgaagatcgggcagcaaatttcctggacggtgaacgattccggcgatttacaacgcctgacctgggaagtgtctcgccgtgagacgcgtacttacgatcgcgttggcaatacctttaaagaaactaaagagttgcaaaaaggtgagtggcgtaacagcgtaatgaccggtcgtctggacggcagtttcgttaacagcgccaagaaagccggattgaacaactcggaaattcgcgctgtgactaaagccttacagtggcagttagatttcagtaaattgcgtaaaggcgatcagttcgccgtgctgatgtcgcgggaagtgctcgacgggcgcagtgagcaaagccaattggtcggcgtgcgtatgcgctccggcggcaaagattactatgctattcgcgccgaagacggcaagttctatgatcgtcagggttccggtctggcccgtggctttatgcgttttccaaccatgaagcagttccgcgtgtcttccaactttaatccacgtcgtattaacccggttaccgggcgtgttgcgccgcacaaaggcgtcgattttgctatgccggtcggtactccggtactggcggtgggcgatggcgaagtagtgattgcgaaacgcagcggcgcggcgggcaactatgtggccattcgtcacggtcgccagtacaccacgcgttatatgcatttgaaaaagctgctggttaaaccgggtcagaaagtaaaacggggcgatcgtatcgcactgtctggaaataccggtcgttccaccgggccgcatttgcactatgaattctggatcaaccagcaggcggttaacccgttgacggctaaactgcctcgttccgaaggattgagcggtaaagaacgcagcgattatctggctattgcgaaagaagtgatcccgcagttgcagctcgactaaccggtaattccactcaggaattcttgagcggaataaataaaatctaatgtggtcgttatggtgatattcattgtaacggccacgttggtgatcaacaggtcaggttttttagcctgatatcagtttttacagtcagatggacaattgcattctctatcttcgcaattatgattagctgattggcctattcgaagagtttcctgatgcaaaaagagaagaacgacagcgcgggttttattccggtattccaaaaatcattccttcatccgcgtttttggggcgtatggctgggcattggcgtgatggcagcgctggcttatttaccggcaagaattcgcgatccttttttagccagtgtaggccgtttggccggtaaattcgccaaaggcgctcgtcggcgcgcgcggataaaccttctctattgtttgccggatatcagtgagacggaacgtgagcaaattatcgatgagatgtttgccactgcgccgcagccgatgatgctgatggccgaactgtgtttccgcgatcctaagcacgtgttgtcccgtgttcattggcatggtgaatctgttttagatgaactccagcagcaagggcgcaacgttattctgctggtgccccacgcgtggtctatcgatattcccgccatgttattggccgggcaggggaaaccggtcgccggaatgttccatcatcagcgcaacccgctggtagattatctgtggaacagcgctcgcctgcgtttcggtggccgcattcatgcgcgcgaaagcggcattaagccttttatcagctcggtgcgtcaggggtattggggctattatctgccggatgaagattacggcgcagagcagagcgagttcgttgacttcttctcgacctataaggccacgctgcctgcggtagggcgtttgatgaaagtgtgccgtgcggccattgtgccgatgttccctgtttataattaccgtgaacatcgtttggatatttatattcgtccaccaatggatgatttagcggatgcggatgacgcttatattgctcgtcgcatgaacgaagaagtagaggctttggttagccctaacttagagcagtacacttggattttgaaactgctgaaaacccgtaaagaaggtgaaatcgagccttacgtacgcaaggatctgtaatccggcgtgagcgggccgcgcgttcagtagtgaaaagtgaaataaaatgcagataaagaaaaagccagtcaacttaacgcggactggcttttttattggcgcagaataattattccacgcgaataatacggctggtgttagtcgtacctatggtacccatcacatcgccctgagtgacgataaccagatcgccagaaaccaggaagcctttatcgcgcaggcagttaaccgcttcattggcagccactacgccatcggtgtggttggcgcaataaaccggcgtgacgccgcgatagatcgcggtcaggttcagcgtatgttcatgacgagacatggcaaagatcggtaaacccgagctgatacgcgacatcatcaaggcagtacggccagattcggtcatggcaatgatcgccgtgatacctttaaggtggttagccgcgtacatcgtggacatcgcgatggcttcttcgacgttatcgaattgcacatctaaacggtgcttggaaacgttaatgcttgggattttctctgcacccaaacagactcgcgccatcgcggctacggtttcagccggatactgacccgccgccgtttctgctgacagcatcaccgcatcggtcccatccaacacggcgttcgctacgtccataacttcggcgcgggttggcattgggttggtgatcatcgattccatcatctgcgtggcggtaatgaccgcacgattcaactgacgggcacgacggatcagttttttctggataccgaccagctctggatcgccaatttctacgcccaaatcgccacgggcgaccataaccacgtcagaggcgaggatgatgtcatccatggcttcgtcagtggctacggcttcggcacgttcgactttggagacaattttcgcgttacagccagcatcccgcgccaaacggcgggcataatgcaagtcttcgccagtacgcgggaaggagacggccagataatcgacgccaatttttgcggcagtcacgatatcagctttgtctttctcggtcagcgcttcagcggataaaccaccgcccagtttgttgatgcctttattgttggaaagagggccgccgacggtgacttcggtgaacactttcatgccctgaacttccagcactttgagctgaacgcggccgtcgtcgagcaacagaatatcgcccggcaccacgtccgcaggtaagcctttgtaatcgataccaactttatctttgtcgccttcgcctttacccaggttggcgtctaacaggaacttatcgccaatattcaggaagactttgccttccttgaaggtggatacacggatttttggcccttgcaaatcgccaagaattgccacgtgacgccccaaacgcgcggcgatttcgcgcactttattagcgcgtaacatgtggtcttcagcggtgccatgggaaaaattcaggcggactacgtttgcacccgcagcaataaccttttccaggttattatcgcggtcggtagccggccccagtgtggtaacaatcttggtccttctgagccgtctggacatgcattactccgttgactggtgaagcattggtgttgttaaaactgcggataattaaccctagggcaaaatgtcactgagtgacgagttttactctgaaattgtgtcatccaaattaaccgcatgcgaatgtagaaacgatagctgtgtaataggttatcggcgcaaaactgaaataaatcagctctaagcgatatttttagcgtcgggcgtttattcaatcaggccctgtaaagacgcgcccttatcaaagcgcgattctttcaacgcttctttgacccgcttcaagttatccctgaatttatcgccgcggcgtaaagtaaatccggttgccagtacatcaatcagtgtcagttgagcaattcgtgacaccatcggcatataaacatcggtatcttccggaacgtccagcagcaatgacagcgttgcttcgtgtgccagcggcgtgtctcgcgaggtaatggcaataacggtcgcatcgttctcgcgtgccagacgggccatttctaccagattcttggtgcggccagtgtgggaaatcagcaccacaacgtcaccttccccggagttcatacaactcatgcgttgcataacgatatcatcgaaataaataaccgggatattgaagcggaaaaatttattcattgcatcatgggcgacggcggcggatgcgcccaggccaaagaaggaaattttcttggcctgagtcagtaagtccaccgcccgatttatcgctgcaatatccagattggttttcaccatatccagactggccatcgtcgattcgaaaatcttgcctgtatatgcagcaacactatcattttcttcgacgttacggttcacataaggtgtgccatttgccagactttgggctaaatgcagtttaaaatcagggaagcctttggtatccagacggcgacagaaacgattaaccgttggttcgctaacgttggccattttcgccagcgtggcgatactagagtgaatggcagtttgtggggaggcaaggatcacctcggcgactttcctttcagatttgctcaggaggtccagattattttggatcttttccagcgtattcatataacgagagtcacccatgggttttgtcgatttcattcaaaggagaaatctatgccggtttaatggaaatatactacgagccgggacccgttggcagaggcattgatgaggaagcagccctttttcatcagaatatgacctgtgtctaattttcagaatggtaaaagacgatcaaaaaagtcataaaattacatttttatcttacgccgccttatttgacggggcttagcgcctgataggatgttttataaccgtttttattgcctttttatccgggtttactggctatagtcaaagagagtacattatagatgtaagaaaattacaaatatcctgcaacgaggagaaatacatggcggtaactaatacagcccaggcatgcgacctggttattttcggcgctaaaggtgacctggcacgccgaaagctgctgccttccctttaccagctagagaaagcgggtcatatccatcctgatacacgcattatcggtgtgggtcgggctgactgggataaagacgcgtatatcggcgtggtgaaggaagccctcgacacctttatgaaagaaaagctggatgacgaactttggcagaagctcagcagccggctggatttctgtaatctggatgtcaacgacagcaagcactttgctaaattgggcaaaatgctcgatcaaaaaaaccgcactaccattaactactttgccatgccgcctagtactttcggtgccatctgcaaaggtttgggcgaagccaagctgaataacgaaccggcgcgcgtagtgatggaaaaaccgttaggaaccgatttggcttcctcacgggtgatcaacgatcaggttgctgaatactttaacgagtgtcaggtttaccgtatcgaccactatttaggtaaagaaacggttctgaacctgttggcgctgcgttttgccaactcactgtttgcttccaactgggataaccgcactatcgatcacgtgcagattaccgttgcggaagaagtgggtatcgagggccgttggggctacttcgatcaggctggccagatgcgagatatgattcaaaaccatttgctgcaaatcctgaccatgatcgccatgtcgccaccggcagatttgaccaccgaccgtattcgcgatgaaaaagtgaaagtgctgcgttcactgcgccgtatcgatcagaccaacgtgcgtgaaaccacggttcgcggtcagtacaccgccggtttcgttcagggtcacaaagtaccgggctatctggaagaggaaggggcgaataagagtagtaataccgaaacctttgtgtctatccgcgtggatattgatgactggcgttgggccggcgtgccgttctacctgcgtaccgggaaacgtttgccgaccaaatgttcggaagtggtggtgtactttaaaaaccctgcgctgaatctgttccgcgagtcttaccaacagttgccgcagaacaagctgaccattcgtttacagccggacgaaggcattgagattcaggtgctgaataaagtgccgggtctggatcataagcaccgcttgcaaacgactaagctggacttgagtttctccgagactttcaacgaagagcatatcgctgatgcctatgaacgtttgttgctggaaaccatgcgcggcattcaggccctgtttgtgcgtcgtgatgaagtggaagaagcttggaaatgggttgactccatcatggaagcctgggcggcggataatgaagcgccgaagccttaccaatccggtacctggggacctgtagcctcagttgccatgatcactcgcgatggtcgttcatggaacgaattcgagtaatcgtttaacagcataaccatcagtaacctcactaccccggtgccgcagacacagccggccgctgaccggcggggtagtgcatccatcagggaatgcctggatgaactcacggacggagcacctgcgcgattataagagccattcaaaggcttagttctgattttgtttcatggcaggcagtatagaagaggcgggtcactttccgtgggtcttcggctgagtgccatcttttaaccgatgcctagaaggcaaccaacatagccctgaatggaaaggcatcaatcctatgtcagacggcataagtggagataacgaccgatgaaaagctggaaaacgagcgcagaacagattatgaccgcaggtccggtggtcccggtaatcgtcatcaataaactcgaacaggcggtgcctttggctaaagcgctggttgccggtggcgtacgcgtgctggaagtgactttgcgtaccccgtgcgcagttgacgcgattcgcgccattgcacaggaagtaccagaagcgattattggtgccggtaccgtgctgaatcctgagcaattggcagccgtgaccgaagcgggcgcccagtttgctattagccctggcttaaccgccgatctgttgcaggcggccaccgcaggcacgattccattgattccaggcattagcaccgtttctgaattgatgctaggcatgagttacggcctgaaagagttcaaattcttcccggcggaagccaacggtggcgtgaaggcgctacaggctatcggcggcccgttctctcaggttcgcttctgcccaacaggcggtatcacgccaaataattaccgtgattatttagcgctgaagagtgttttatgtatcggcggctcctggttggttccggccgatgcgctggagaaaggggattacaatcggataaccgagctggcgaaacaggcggtagaaggcgcagcggcataagctgtctaagcccctgaaccggcgagataatttctgcttttctctagaattgaaaacccccaggttctgggggttttgtatttttgaaataactaaagtgctcttttataaacttttttttctctaattttttcaaattggcggtttgctttctatttttgcctatggtacaaatagctcagttaattattctaatttgatgaggatttgaggcaaatcgcactcggtttcacgaaatatgtgcggctaaaaaagagaaaacattatgattaaaactaacggaattactctcaaaacttctacctgccaactcttcctgtctgccattctagccagtgaacatcactggtgcagcgagctttagcgtcactctcccttaaccggcgcggcatttaactccgcataatccgggcatagcatttttatacgccaagtgagtatctatttcttacggcctacgcacgtctgcaatctgtgatttcagcttgtgcatgaggataaccgtaacaaatagaccttagcgtgcgttttcgcgtgttaggagagattttatgatttattggatttttttaggcttagctatcgttgcagaaattattggtaccctttcaatgaaatacgccagcgtcagcggcgaattaaccggccatttggtgatgtatgtgatgatcaccggttcttacatcttattggcgatggcgattaagaaagtggcattgggcgtggcttacgcgctgtgggaagggatcgggattctcattattactctgttcagtgtgctgtggtttggcgaaacgctgtctccgttgaaaatcgccggtctggtgaccttggtgggcgggattatgctggttaaatccggcacccgtaagccgaaaaaaccgggtcagggcggtggcatcaagctccccggagcgctgaaagccaaagtcactggccagccgacattagcggttaagtcaggtggggatcatgcaacagcttgagttttaccacattggctttttgattctggcggtgattttagaaattcttgccaatattttgttgaaaatgtcagacggcttccgtcgggtttggttagggattttctccctgctgtcggtacttggtgcgttcagcgctttagcgcaggcggtaaaaggtatcgatctttcggtggcttacgcgttatggggcggttttggtattgccgctaccgtcgcggccggttggattctgtttaaccagcgattgaattataaaggctggattggtctgattctgctgctggccggtatggtgatgattaaactggcgtaacaccggggatcgcactgactcagtaacaaactacagaaaagtcacagagaaaccatataaaaacaaaagggtagccggtgcatgcgggctacccttttgtacgatttaacgtgcggcgataattttaatttcgactttatactgcggattcatcaacttagcctgaacggtgcagcgtaccggtgcgctgccgtcaacgacccaagcatcccaggcggcgttcataccggcaaagtctgcagcgtcggccagaaaaattgtcgcatcgaggattttgctcttgctcgaacccagatgattcagcagcatatcaatagcggccagcgtattggccgtttgcgcggtaatatcagcatccagattttccggtacgccggtgtaataaatagtgtcgttatacaccaccgcatctgaccagcgtttttccgggttaattcgttcaatgctcattttcactcctttgtgtgaatatcgttatctgctacctctatcagggtaacataagtgatcgcgataatgtgtgtggtgcctcagcctcatgcttggcataatcagcgctgatttgattcggcagagagaaagtgtgacagacgattttgcaatagacggcgctttagcgcaggcgataaccggttttaacccgcgagaatcacagcgtcagatggcgcaggcgatcggcgaagtcattaccaccaaacaacaattggtggtggaagcaggcaccggtaccggtaaaacctatgcctatttggcaccggcgctgcgtgcagactgcaaagtcattatctctaccggttctaaggccttacaggatcagctgtattcccgcgatctgcctacggtcgccacggcgttgaaatataaaggcaaactggcgttgctaaaaggacgctccaactatttgtgtctggaacgtttggaacagcaaactctggcaggcggtgagctggcgggagaaacgctggtggatttagtccatttgcgcggctggtcgtcacaaaccgtagacggtgatatcagcacctgcggcgatgtggcggaagacagtttcgtctggccgttagtcacaagtactaatgataactgtctgggcagcgattgcccggcttatcaggactgttttgtggtgaaggcgcgccgccgcgcgatggatgcggatgtggtggtcgttaaccatcacttgtttttggcggatatggtggtgaaagaaagcggctttgccgagctgatccccagcgctgacgtaatgattttcgatgaagcccatcagattcctgatatcgccagccagtatttcggccagcagctcactagccgccagcttatggacttagctaaggatatcaccatcgcttatcgcactgaggtgcgagattcggtacagctacagaaaagcgccgaccggctaagccaaagtgcgcaggatttccgattggtgcttggcgatcccggattccgtggcaatctgcgagacgtactccagcaaccggcgatccagcgggctttgctgctgttagacgatgctttagagctgtgctatgacgtaatgaagctgtcgcttgggcgctccgctatgctggatgcggccttcgagcgagccacgctatatcgcaaccggttgaaacgtttgaaagaagtgactacgccgggttatagctattggtatgaatgtaatgcgcgccatttcgtgctggctctcacgccgctgtcggtttccgatcgtttccgcgagttaatagaagaaaaagccggtacctggattttcacttcggccactttatcggtgaacgatcagctagggcattttactcaacgtctcggtttaaccgatgccaaaaccctgctgcttcccagcccgtttgactacgccaatcaggcattgctgtgtgtaccacgaaatttgcccaatgccaatgagccgggcggggcacgtaaactggcacaaatgctcaaaccgatgattgatgctaatcagggacgctgctttttcctttgtacttctcatcagatgatgcgcagtctggcggaggagtttcgcgccagcatgacgttaccggtgctggtgcagggtgaaaccagtaaaggccagttactggctcagttcgtcgctgccggtaatgcgttactggttgcaaccagcagtttctgggaaggggtagacgtacgcggcgatgcgctttcctgcgtgattattgacaaattgccctttacttcaccggacgatccgctattgaaagcgcggattgaagactgccgattgcgcggcggcgatccgttcaacgacgtgcagttacccgatgcggtgattaccctgaaacagggcgttgggcgtttgattcgggatattgacgatcgcggggtgctggtgatttgcgataaccgtctggtgatgcggccttacggtgcggtattcctcaatagcctgccgcccacgccacgtacccgtgatttgaccaaagctatcgctttcctgaaacggcaggagtgagggtaaagccttgtggggtgtgctattatgcgcgccctgtgttgaatatagattctttttcctgccgaggttggcatgtccacgcgaattttagcgatcgataccgcaacagaagcctgttctgttgcactctggaacgacggcgcgatccacgcccattttgaactttgtgccagagaacacactcagcgaattcttccgctggtgcagcaagttttaaccgaatcccacctgacgttaactcagttggacgcgctggcctttgggcgcgggccgggcagttttaccggtgtgcgtattggcatcggcatcgggcaaggattggcgttgggtgccaatttgccgatgattggcgtttccacgttgcaaaccatggcgcagggtgcatttcgtctgatcggcgcaactcgcgtattagctgcaattgatgcacgtatgggcgaagtgtattggggacagtttgaacgccagactgacggtagctggctgggcgaagaaaccgaagcggtactgactccggcgcaagtacaagagatgacgcaggatttaagtggcaattgggcctttgttggcaccggttggcagacttatcccgatctggtcgcgagtcatgcggctatactgactgatgggcaaatgttgttgccgcaggcggaggatatgctgcctctggcgatccaactgtggaacaacggtgcggccttaccggttgaacaggctgaaccggtttacctgcgtaatgaagtgacctggaaaaagttacctggacgataaaatatggcaacttgtctctgaatttatggtcttaaagtttaagattaattaaggagataacggcgatgacacccagtgaattaaggcgtaaatggcttttcgggctagtaggactgagtgccttactcttgactggttgcgtaaccattcccgatgccataaaaggcaccacggctacgccacagcaaaaccttaatgcggtacgtaatgcgccgcaggtttttgccggtcaggaggcgcgttttggcggcacggtcgtcaatgtggttaacgaaaaacaacgcactcgtctggagattgccagcgtgccgttggattcaggcgccagacctattctcggtgaaccgtctcaagggcgagtgattgcctatgtggatggtttcctcgatccggtagatttccgtggtcatctggtgacggtcgtcgggccaattgtcggcagcgaggcgggcaaaattggtatgacgccctataacttcgtggtaattaacgccaccggttataagcgctggaatattgcccagcaggtgatgatgccaccagcgccaatggggccttggggcttccgcggtcatcctgggtgggggccaggctggggttggtatgataccgggccagcgcagattcagactattgtaactgaatagcgttgctgaaacggtaggccagttagccagccgttgccaatataataatatagagaagggtgttgagcgatcgacacctttttttattgttttaatccgacaattagggcgctaaatcatcctctgctcggataactccccgttactgccccacatatttgactgttatctcgcgagagtgaacgctgttaggttcaaaaaatgaccctgattcaggggatagggcgcatcattgccacccggtcagccatgccgctcgcgacttcttccgtcagtattttcgtcagccaaggcggcgtattacgtgaattcaggcgaataaaaccgaatttggtatagagcgcaacgctttgagcaaaacggctaaaggtcgtcagatacagcgcggtagcgccgcgatctcgcagacgatcaatgactgccgccaataattggctgccaataccttgtccaccgtgctggggtacaacatcaatttcccccagtaaagccctctgatccacccagtacactaaagcgaaacccacgggagtcccgcttctgtctttcgctatccacaggcgtttttctcgctgcgctgtcactaattcaatcagcggcagcgtttctgtttttagatcatcaggcaacaagtgtgcagggaaaagttcggctgcctgttgctcaatacttgccaaaaacggcagatgttgctttttagcagactcaatctgatattcggtcattgtatccactcgttaacattagagtgatagcttaaccgccaatgaagagtcgcataaggtttttttgataaatggataaaaactatgtgtgctatttaatcgatttgttgaaattatcaccgggtaatcatttccagctcagctttagattataaactgacttaaacggtgtataatcaaagagttacaatcattataattatgaatttatataacgcattgattttatttatattaatgaggcggcgatggccgccttgtttttttgttgagatacatgaaaaaaattagtgatgtacttctcaacctcaaaattgtttaaaagcaaactggtacgctgagttaaaatattgttaaagtcctgaggtggatttgggtgaagatatgataatcaacaatgatttcaggagtgctaccttggaaaaagcatggctaaaacgttacccggcggatgttccagcggaaattgatccggatcgttactcttctctggtggaaatgtttgagaatgcggcgctgcgttatgcggatcagcctgcatttatcaacatgggtgaagtcatgactttccgtaaattggaagagcgtagccgcgcttttgctgcctatttgcaaaatggtttggggttgaagaagggcgaccgcgtggcgttgatgatgccgaacctgttgcagtatcccatagctttgtttggtattttacgggctggaatggtggtggtgaacgtcaatccgctgtacacgccccgcgagctggaacaccaactgaacgacagcggcgcagcagcaatcgtgattgtttccaattttgctcatacattggaaaaagttgtcttcaacacacagattaaacacgttattttgacccgcatgggcgatcagctttccgcagcgaaaggcacattggtcaactttgtggtgaaatatatcaagcgtttggtgccgaaatatcacttacctgacgccatttctttccgtaccgtattgcaaaaaggccgtcgcctgcaatatgtcaaaccggacgtgctcaataccgatttggctttcctgcaatacactggtggcactaccggcgtggctaaaggcgcgatgctaacccaccggaatatgcaatctaaccttgaacaggctaaagcggcctatgcgccgttgctacagcctgggcaagatttagtggtaacggcgttgccgctgtaccacatctttgctctgacgatgaactgcctgctatttatcgagctgggcgggcgcagcctgttaatcaccaatcctcgagatattccgggaacggtgaaagagctcagccgttatccctttaccgcgatgaccggggtgaataccttgtttaacgcgttactgaataacgaagaattcaacaaacttgatttttccactttgcgactttctgtcggaggggggatgccggtacagaaagccgttgcggaaaaatgggaaaaactgacgggcaggcacttgctggagggctacggcctgacggagtgttcacctttggtcacaggtaatccctatgatttaaaacattacagtggcagtattggtctgccggtgccttctaccgatgttcgcctgattgatgataacgggcaggatgttgaaaccggtatgccgggggaactatgggtgcgcgggccgcaagttatgttaggctactggcagcggccggaagccactgacgaagtcttaaaagacggttggttggccaccggagatattgccactatcgatgatatcggcttcttgcgtattgtcgatcgtaaaaaagatatgattctggtttctggattcaacgtttatcctaatgaaatcgaagatgtggtagcgttgcaccctaaagtgctggagtctgcggtgatcggtgtgcctaatgaggtttccggcgaaacggtgaaagttttcgtggtaagaaaagacccgtctctgagccgagacgaattgctgacccattgccgccgctatcttaccggttataaagtaccgaaaattgtcgagttccgtgacgaattgccgaaatcaaacgtaggcaaaatattgcgcagagaactgcgtgatgaacctgttaaggagagtagcaaaaacgctgcttaataggcttcgttacaggctcatcatcaacaacgccggtcaataccggcgttgttgtgtctgtcataggctaacgaccaagagaatgatgttttgaattatcagttgatcactaccgacgctgcgttgcagcaagtctgcgagcaagctcgtaaccatacccaggtggctttggatacagaatttgtcagaacgcgtacctactatcctcagttgggcctgattcaactgtttgacggtgaacaactttcactgatcgaccctttgccgatcaccgaatggcagccctttcgcgagttgctgaaagacgagtcggtggtgaagtttctgcacgcgggcagtgaagatcttgaagtctttcttaatgcatttcagcaattacctacgccaatgattgatactcaggtattagctgcctttacgggtaaaacgctttcctgcggttttgcgacgctggtggcagaactggaaggcgtcgaattggataaaagtgagtcccgcaccgattggctggctcgtccattaactgagaaacagtgcgattatgcggcggccgatgttttctatctattgcctatggcaaaaaagctggtggatgccacactggcggcggggcgtatggatgccgcgcaggacgaatgcctgctgctgtgtcgccgtcgcagtgaaacggtagatcctgagctggcttatcgtgagataactaacgcctggcagttacgaggtcgtcagttggcatgtttgcaaaaactggcgtcgtggcgtttacgtcaggcgcgcgagcgtgatttggcggtcaactttgtggtcagagaggaaaatctgtggcaggttgctcgctatcaacctacgtcactcggtgaactggattctctgggcttaagcggtcaggaaattcgctaccacgggcgcactttgctggcgctggtggctgaaggtaatgcagtgccggaagatcagttgccacctttggtcgccaaccttatcgaccagccgggttacaaaaaagtctttaaagatattaaagcattgattcaggcagtgagcgagcgcagtggattaagcagtgagcttttggcttcacgtcggcaaattaatcagttattgaattggcattggaaactcaagccgattgaaattcgtcctgagttattagccggatggcgcggtgatttgttaggtagtgaattggaagaaatacttaaacagtattaatcctatttaagggcaggggaactctcttctgctctgaatattttatacgcggtaggattttatttatttagcggtatcaataatccatcaagctattaagacttttttttgccagaaatgacgaaactcatttccgcagtaacttcttttcactgtgtttatatacagccaggaaaactcaattaccccctgtaaataaatacagggggtaattaatgcgacgatgtcatttaggtgtttcttccgtttccggtaatgtcacgttaagttctaacaccgaaatatcgtcacctttctgctcaaactgaacgtgtagcatttccggatcgatctgaatatatttacaaatcaccgccaatatatcgcgcttaagatcaggcaaataatggggctcactgtccccacgacgacgctcagcgacgataatttgcagccgttccttggctatattggctgtcggttttttgcgggacagaaaaaagtctaacaaggccatggtttatcccccaaaaaggcgtttcaggaagcccttcttctcttcttcaatgaagcggaatgggcgttcttctcctagtaaacgatcaacggtatcgtcatatgctttacccgcatctgactctttatccagaataaccggctcgccttggttagaagcgcgcaatacggattggtcttctgggataacgccaaccagcgggatcctaaggatttccaggacgtcctccatgctcagcatgtcaccgcgactcacccggcctgggttataacgggtcagcagcaggtgttctttaatcggctcttcgccacgttcggcacgacgagattttgaggataaaatacccaaaatacggtcggaatcgcgaacggaagagacttccgggttagtggtaatgactgcttcatcggcaaagtaaagggccattaacgccccgctttcgataccggcaggagaatcacaaaccacaaagtcaaaattcatatcgccaaggtcgttcaggattttctcaacgccttcaacggtcagagcatctttatcacgagtttgtgatgcgggtagaatatagagattatccgtgcgtttatcttttatcagcgcctgattcagggtggcatcaccttgaatgacgttaacaaaatcataaacaactcgacgctcacatcccataatcaaatcaaggttacgcaggccgatatcaaaatcgatgaccacggttttcttacctttttgggccaagccggtcgcaatggccgcacttgaagtggtcttgccaacgccccctttacccgatgtaacaacaataatgcgtgccatgaaatggattccttgttaaaagggcttaatttagaggttgtatggttaaagcattatccaacagatgaagacgtgcggcctggccaaaataatcgcttggaatctggtcacttaaccaatattgccctgcaatagagactagctcagcgctcagatgtgtgcaaaaaatctgacactgagcatcgccagaagcgccagctaaagcacgccctcgcatcattccatagatatgaatattgccgtctgcaataagttctgcaccggcactgacactgctgataacaatcaaatcacaattacgggcataaatctgttggccggaacggacaggagtattaatgatacgcgtcttaacgggggcattttccggtgggcttactggctcgggagccatcttttggcctttaccttcattcagtaatggcaaacccgctcgagcaatcgcacgtttttgtcgttcatcccgacagccgctgacgccaacaatacgaaggcccgctgaagtgacagcctgctgaacatctctgaagttagcatcgttaggtaacgtagcaacattaagaacaacaggggcgtttttcagaaaagcgggagcttgttccactttttcctgcaaagcctgacgaattacctccggctgtgcatgatgtaaatgcactaccgatagggtaaaactactgccttttaactcaattggcgattgtgacatctatcctgactcagtttcagctacgttaaatccccggaataccattcggggtacgatattccgatgtacctatgcatgttataggtaatataaagataaatctatccgtatcaatatatcgaaacccttcagcaacatttattaaaattcgattggaaattacagcacaactttggcgtattcgctagcccacctcggctatatatctctgttactggtcgttttatgtgataattgatccggtaccaaatcaaattcaccggtgtttgtcttgtatgtaaaatagacagaaagtaatgtggctgagtcagttctgtctatttatcccattgatgttttttcaatagaagtttttccggttgtattttagtgataataaaatcttcaattcatataatttcagatcaatctgagcatttattgtcagccttgagtccaatagcgagttaattgggcgaattatctgcgataaagatcacagttcgccgacgtagatctcggacgtggtgatggagcgggtttggggaaatgaaactgccgtgactgatagcgagtttagtgctggcaggcatggcgcttctccgccttttccactttagatgaagcagtgcgcccactaaagatagcgacgagatccctattatttaaggattagtgagtaatagccggtaatagagagtggtagtcttgaaattatcaccacgcgttggattaggagagaataatgaagggaatctatctttacttaattctgttcagcggagtcgcttatatccctgttaatgccaatgtgagtgatttggcaagctacgagcggggattacaactcttgggcgaatgggagggggacagagaaaggggtatcggcgctttctctgcgatgactctcccttcattgaagacggttgcccggtggatgcgggattgccactacaacataatggaacagaaaaatcgtttcttataacaattgaaacccgtctatgtagccataggctgagttcggtgacgtttaattatctgggaatattgccaattttcagcaacccaatgtggttatccaccgtgtaaaaaagcaacggcaaccctgatttgacggccgctggctcaagggctaaagtcactttttctgatacaggcgtggtatagtccacggcttatacaggacgttattgaccacttgagtagagctaaaaacatgcattgtgtgatttatcgaagccctaaacgggatcaaacttacctctatattgaaaaaaaagacgatttctcccgggttcctcctgaattactggccagctttggtcaaccccagttttccatgatgttgtctctttcagagcgaaaaaaattggctaccgcagatattgagaaagtaaaaactgcgttgattgagcagggtttctatctgcaagttccgccaccgccagaaagcctgctaaaaatgcatttagggacggataaagcctaattctccaccccgatgagaagcccggatgccagcctttgctgcgccgggtatttcgcaggttttttccccctatcggattaaattgattggctgcctcaaagtattgccagtaaataaccaaaggaagtgggtgatgagggtttcgttactgacaatgttgttcgcttcggccgttttgagtggcgggttacattcggctacagctgctccggcagtgacgccagattcggcgaaggtcgcaaataggtcgacaaccgtcaccacgccggcgcagcaaggccgcgatcccgctgaattccacgcttatgtcgaacaacttaaaatccaggctcgctcacagggaatcactcaggcgaccttagatcaggcgtttgctgacattcattttgttgaccgagtgatcaaatccgatcgcaatcagttagaaaagaaagtgacgttggatgattatctacagcggacattgcccgcgcagaaaatcaaacagggaaaactgtttcatcgccgttataaacctcagttagcccgagctagcgcccgctacggagtacctgagcgctatattgtggcgctatggggaatggaaagtggcttcggtaaaattcaggggaaagaggatgtcatttcggcgctagctacactcgcttttgaagggcggcgcgaagcattttttaccaaggaactcatggctgccctgaatattattcagcaagggcatgtcggtaaccaaaagctaaaaggttcctgggccggagccatggggcagaatcagtttatgccatcctctttcctgaattatgcggttgatggcgacgatgacggaaagatcgatatttggaccaacgtcgatgatgtttttgcctcaacggccaattatctgtctaaagaaggctggaaaacaggggaaagctgggggcgggaggttctgttgccggcgaatttcaaatcgcaatatgtgggtttgaaaaatgagcaggtgcgcactttggctgagtggcagcgaatgggcgtattaccgctgaataaaaaggcgttcagttatcctgcattacgagcctgggttattacaccagataatatgcaaggtcgaacattcctagtttatgataactttagaactatcatgcattggaatcgctcttactatttcgcactcagtataggtatgatggctgatggtattgtacgttagcagagcgaaatattgatgacccgattgggattaactgtcgatgtactctagagtttatctgtagatgatttcaggagaagcaacatgtatcaacatagagactggcagggagccttacttgatttcccggtaaataaagtggtgtgcgtcggcagcaattatgcagatcatattaaagaaatgggcagcgcagtacccgttgagccagtgttgtttattaaacctgaaaccgcgctgtgcgatattcgtcaaccggttgctattccaaaagggttgggcggcgttcatcacgaagtggaattggcggtattaattggaaccccactaaaacaggccaatgaagatcgggttgctcgcgcaatagccggttacggtgtagcgctggatttaacgctgcgtgacttgcaaatgggttttaaaaaagccggtcaaccgtgggagaaagccaaagcttttgacggttcttgccctatatccggttttattcctgtggcagagtttggtgacgcgcaacatgccgaactgtctttaatgatcaacggtgaagttcgccaacggggcaataccgaagatatgattacgccaattctgcctctgattagttatattacgcgtttctttaccctgcgagccggagatattgtgctgacgggaacgccgcagggcgtagggccgctaaattcaggggatatgttacaaattgctctgaatgataaaaggctaaacactcgtattatctaatgatttgctcgctgccccggcccgcttggggtggcgaggcttgcatcttcgctctaaagcgtctataacgacccgccatcacttacttacaccggataccgatatgtcacaacttcctttttggcaacaaaaaacgctggccgaaatgtcagacgcagaatgggaatctctgtgcgacggctgcggtcaatgttgtttaaacaaactgattgacgaagacaccgacgaaatatatttcactaatgttgcctgcaatcagctaaatatcaaaacctgtcaatgccgtaactatgagcgtcgctttgaatatgaagaagactgcatcaaattaacccgcgaaaatctggtgacctttgattggcttccgcatacctgcgcctatcgattggtgggtgagggcaaacaattacccgattggcatccgctattaaccggttccaaagccgcaatgcacggtgaacgtatttctgtacgccatattgccgtgcgtgaaagcgaagttatcgactggcaggaccatattttaaataagcctagctgggccaggtagtcaattgatgaaaagaattgttttcttttaaaaaaccgggtgcgccagtggtttattgtcattaaaatccaaggttattatcatatatagatctaggttatttcttcttgctgcgtagccatcgtgaggaggggggtagccttatcattgcttgttttcactcatcatttgaaatgcacttcttattggtctttattatatttatacaaaaataaaacttgcgtttgatattttcccattaaagtaacaatattcactttaagtttaagtttaagtttaagtttaagtttaagtttaagtttaagtttaagtttaagtttaagtttaagtttaaagcttaatgataaatttaatgtgagtacagcggtggttcatgattactgctcctgaggtgaaacggtatggtatgcctttcatgatgcaaagttcgaaaaatgaaaatattctaattggtgtggatcaagcggaaaatattgccagccagccagccagccagtgggttgagtaccaacacggcggccatcccggtgaagctgctaagggattttttctaacgttcaaactcaggctaatcaacttaagatcaaggtaataggtatttgggtaagaataaattaggagtaaatgtatgctccatagaacgagagtttttaaactgcaaggatctcgtcaggcatctttttctggtgttggtcacaatattttggggcaaatagcaaaggcggctttatctctctatcgtattgtgaaaccaccagtcggcaaggtcgatgctgacatataaaaatatgattcttatcaggcaataaaatgttatttaggggcgtaactatctactgattaattcatcgaatatcattcgcaactagtatttggtaaattttaaatgagattttttatttgtcactatatgtgagggtcagtaggttcaacacgattcaacaaatcaaacattgtttaattcgagaatattcccctgttatttctgtgtggaaaccgcaggggaagtcataatatcgttagctgctatttaagagttatactgggctaaaattattcgcgttgcttcagccagaacatcccgtcgtgattctgcatctttcttatgttgggtaaaatatactgcgagaattaacggtgctcccgttggcggccaaagtacggccacgtcattggttgtcccgtaatcaccgctgccggttttatcacccacgagccagtctgctggaacaccggcgcgaatgctggcatttcccgtagtatttccttttaaccattgagccaactgttgctgctgggctggcgctaatccatcgccgaactgtatttttttcactaacgccgccattgagcttggcgttgtggtatcacgaggatcaccaggaatagcgctgtttaattcaggttcccagcgatccagacgaaatgcagtatctccgaggctctgggtaaacttattcacaccttctaatccgccaagttgctgaattaataaattcgcagcagtgttatcgctatattgcagcgctgcggcgcaaagtgcagctatcgtcatgccttttcccaaattttcgcgagctatcggcgcataggaaagcaggtcggcctcagaatacgtgatatgtttttccagcaaagcaggttgagacatactttggcgcaatattgctgccgccagtaccagcttaaaggtgctacagaatgggaaagcttcattgccacgatattgaagttctttaccgctttggatattaatcagcgaaacgcccaaacgaccttgagctttttcctcaagggctgtcaattgttcagataatggctggccggcagatttcgcccatgaggggaatgccagattggccaatggaagggtgatacctgcaagtagcagcgagcgccgcagcgttgaatgcttcatagtcgtctcttatgcaatgtgaatctggggttctgagcaataaactctgctcgtctctgtttgaccgcaaaatgagagcggctccgagttactcaagattcggtgaaataagagaacaaaaagaccaggattgccacggcgatcataatcatggttgtacgtctcattttagcgctccaatgtgttgttcaatctaaaggtgaatgaacatggcgactattctacgtctgcccaggtaaaaaccctagtccgttaggggagcgggaatcgacagcatcaggatattgatttaatgcaattaaaccagtgacattttttacctgcttgactggatatgacataatgcaggtaagattaaaatgataagttgaatgccatgaaaaaaaataaattagtgttgtttaccttcggattagcgatggtcataggtacattctctgcctcagtattggcatctccgctgatgcgtttacagtgtttaactgaatcggggttaaagtcagagagtttgctggatggccttaaccaacaactaaccattgacggtgctattttcaaattcaccgaaattaaaaatgacgccaatggcgaacgtctgctttttcaacgtactgttgataacagcacttttcacgctgcgttgaatatctccaccacgcctatttatctagatttgaacaacggtgagaaaacattgaatttcacctgtaaaagtcttaaggcctaagttttactgcaagtgataccgttagagtcttacgttttctctgtgtagaaagggtaagcagcccctgttccccatacaggggctgtcgttataacgattaataaacggtttgattccttccagcgtttttggccttatagagattattatctgcggcttttagtagcgaatctaatgttggtgtatccgtacttagctgttttagcccaaatgaaagggtgagtttaatattatccccgcttgctggagtgaaaattgtctcttcgacctctttcctgattttttcaattcgctgataagcgttctccacatgacagttgaaaaagaccatggcaaactcctcaccgccaatgcgtatcaccatatctgattttcggctattctttttgaacatattagccaactcgcaaagtataaagtcacccacaggatgcccgtaggtatcattgatcttcttaaaatgatcgatatcgccggcagccagagtaatgggtttgttcagcgagtggatgaccttccaatctttcgctaatttacgccgattgaataaatgtgttaacgggtctatattagcttctctaattgctctcttattggttataatctgtttgaatataatgaccaaataggtcagttgcagaagtaagctgaatccaagcccaaaacagaataatatcttggcgcttttatctacctccgagatggccattttcgcctcggataactgctcactgctgtatttcaagagtcgcatgtttcggagttcaaaatcgataaaatggctaagtgcatcgttgaaaagaatatttctcgcttcattaatatatccgttttgatacagcgaaactgctttttcacttaggctaatataacgcagccaggcatgatacgcctcgtcaagatcctgcctgttattgctctctggcaaggttttactatacatatagaaagtattttctattcttattattaactcatttgtttctttccgtacctcctcaacagctttatcatcgtgagcattaaccagttgaagctgcaactgccttaattgcacggtatcagtaataaagctcctgcaggccgtaagtgctggtatagttttatccgtcagttcggccgttctggcaccgaaccgggcggtatcttttagcaggttattacccatatagaggtaaagaatattcacaatcacaatgacaataaatacagatatggcgaccccatttttttttgaggcaagacatcttaatctcccagtgttttcctgtttataaagttgtcataacgcacttatatagcctggttagtcttactggtaggtaatggcagtttttttgtcgctgataatagttaaatagataagtttagtccaaaattttttacttcatttcatttttaacggaacttatattgacgggtaggttattaatgtacttgattctggctatttctctgagattggataattatagctattatgcaaataaaaaaaggtgcctttcagcacctttttaagattaggagtttgttatttatcggccaaacaggtcacgtcttttcggcttaacaaattgactaataagaaccagaatagcaaccacaaggtaggcggaaaatataacgactagccactgaggcatctcaagagataagaattgccactgtctcactgagcaatcgccactggccaggaatacagaaggcagccatttgtctagtggcaaccaagacgggaaattaacaaagaaatcgcaggtggcaaatggggaagggtgaagttggaacatggtatgttcccacgctaattgcacgcccttccaggcactgtatatccacaatgcaatcgctaaatagcgtaatggcgatttgggcgcaatagcgccaagcagcgaagcaccaagaataccaaacaacgcacagcgttcataaatgcacattacacatggctgtaatagcatgatgtgttgaaaatagagtgcggccagctcaagcagaagtgcagtcaaagccattaaaagccaagcaccgcgcccttgggagcaacggttaagaaattgcaacatatctttatattccatgcagtaagcaattgtagtggcagtgtaaaccaattcatcattgctgccagctatccggcgacaagtttaagcgaaaatcatctgtttatcgcttagaccacgatttaacggataaaaattcatctttgatgatgttaatggcattttaagccagccctttagtataaaagtgtagggctggctgaggtcagaatgcaaggaatcagtgtgtaaccagtgcgcctgggtcaatttgcggcacggctatcaggcccgattgaatcattaattcggtcataggaactaatgcaaactcaacgcatagaagaccaaccaacgtcatgacaatggtatagggcagtgccatatacaccattcttccgtaggataaacgaataagcggagccagcgcggaagtcagcaggaataagaatgcggcctgtccgttaggcgtagcaacggaaggtaaattggtgccggtattaatggccaccgccagtagttcgaactgctgtagggaaataacaccctgttcgaaggcgctacgagcctcgttaatataaacggtgccgacaaaaacattatcagatacggaagagagcaaaccgttaaacagataaaacagcgacagttgcgccgatggcgacgactgtaggacaaactggataatcggcgtaaacagatgctgttcaatgattaccgccaccacggcaaaaaataccgtcaataacgcggtaaaaggcaaggcttcctgaaatgctttgcccagtgcatgttcgttggtaacgccgcacaacgacgtggccagaataataacggacaatccaatcagacccacttcagccaaatgtaatgccaacgctacaaccaaccaaacgccaattaacgcctgaatgattaatttcattttttcctgacgcgtgcgtttggcggaggtttgctgatcgtattctttcaaaatctggcgcacacgatccggcaattctgcaccgtagccgaacagtttaaaacgctcaaccagcagacagaccaataaaccgcaaacaaatacaggcaaagtgaccggaagcatgcgaataaagaaatcgaagaaatgccagccagcgcttttggcaatgatcagattttgtggttcgccaaccatcgtcattacgccacccagcgcagtaccgacaccggcatgcatcatcaggctgcgtaaaaaggcgcggaactgctccagtgtcttacggttttcctgcgaatctatccagctgtcatcgttgacgtccttatcgctatgattggaggcaacgtggtgataaatagtataaaaaccgacggatacgctgataaccacggcgataaccgttagtgcatcgagaaatgcagagaggaaggcggaggccagacagaaagccaaagacagaatgattttcgaccgaatattcagcagcagcttggtaaagacaaataacagcagctgtttcataaaatagataccggccaccataaagattaatagcagcagcacttcgagattattagcaatttcctccgcaacctgatgcggactggtcatcccaataataattgcttgaatcgccaataaaccgccaggctgcaacgggtagcattttaacgccatcgctaaggtaaaaataaactcaacgaccagcatccatcccgcgacaaagggactgacgaagaaaaagacgagagggtttattatcagaaaaccgataatggctattttgtaccagtctggtgagttgcccagaaagttcttgattagagcctgtcgattggtcatatccattgtgtgtcattatccccttaatttttctatggttcagttaataatcaagcttacggcgtgctttgagcaagcgatttaaagagtgtaaaaatatgactagtagcgtgaagttggcgcgatttttgccattttatgaccgctttcaccaattgttctgctgcgacgctatatcatacacggcgcgtctggtatgataagctctattaaattgctgaaaaatatcgctacggaacgtcacacacatggttataaaggcgcaaagtcctgccggtttcgcggaagagtacattattgaaagtatttggaataatcgcttccctccaggatctattttgcccgcggagcgtgaactttcagaactcatcggggtaaccagaacgaccttgcgggaagtattgcaacgtcttgctcgcgatggctggctcaccattcagcatggtaagcctacaaaagtaaacaatttttgggagacgtcgggccttaatattcttgaaacactggctcgcctggaccacgatagcgtccctcaattgatagataatttactcgctgttcgaaccaatatcgcttcgatttttgtgcggactgcgttccgccaacatcccgatcaagcattggatatactggcgaaagcgtcagaggtagaagatcacgcagaagctttcactgctttggactacggcattttccgcggtctggcatttgcttccggtaatccgatttacgggctaatcctgaacggactaaaaggtctttatactcgcgttggtcgttattatttctctaacccggaagcccgtaagctagcgctgaacttttatagccagttagctagcctgtgcgaaaataaatcatacgaccaggttatggaatgtttgcgtaactacgggaaagaaagcggggcgatctggcacagtatgcaaggcacaatgccgagcgatctggctgaagcgcgccgctagaacggcaaatgacaatgaaaaagggccattaggccctttttactatctgataaacggtattctcgataaaaccgcatcagacgaaggcaaaggttacaatttgctttcacgtggtggcgtgctttccagcagttcggtgctgccatcctcattcaactgttcaatgtgtacgtcaaatccccagaggcgatggatatgtttcatcacttctcgacgacttttatccagcggagctcgatcctgcggaatatagcgtaaggtcagtgagcggtcgccgcgcaaattgacattccaaacctgaatatttggttcatggttactcagattgtattgagcagacagctcattgcgaatagcccgataaccctcttcattatgaatcgccgagatttccagataattatttttatcgtcatccagtacggtaaataaacgaaaatcgcgcatgactttgggcgacaaaaactggctaataaaactttcgtctttaaaatcacgcatggcgaaatgtaacgtatctaaccaatcagaaccggcaatacccgggaaccagtagcgatcttcttccgttggcgacatacagatgcgcttgatgtcctgaaacatggcaaaacccagcgcataagggtttatcccactgtaataagggctgttataggcgggttggtacaccacgttggtatgactgtgcaggaattccatcataaaccgatcgctgacccgaccttcgtcatacaggtggtttaaaatagtgtaatgccagaaagtggcccaaccttcattcatcacctgagtctgtttttgcggataaaaatattggctgattttgcgtacgatgcgcaggatttcccgctgccaggactccagtaatggggcatttttctccataaaatagagaatattttcctggggttcacttggatagcgtagcgcttcagcctgggtttcttctcgagcaatgcgcggcagggttttccatagggagttgacctggctttgcagatattcctcccgacttttctgccgagctttttcttcctgtagcgaaattttttgcgggcgtttataacggtcaacgccgtagttcatcagcgcatggcaggaatcgagcagtcgttccacttcttctacaccgtagcgttcttcacattcactgatgtaatggcgggcaaacagcaggtaatcgacaatggagctggcgtcagtccaggttcggaaaagatagttatttttaaagaaggaattatgcccatagcacgcgtgagccatgaccagtgcctgcatcgtaatggtgttttcttccatcagataggcgatgcaagggttggagttaatcactatttcataggccagaccctgctggccttgtttatatttctgttccgtttcgataaattttttgccaaacgaccaatgggtataatttattggcataccaatacttgaataagcatccatcatttgctcagaggtgatcacctcgatttgatgcggataggtatccaatcgataatgtttggcgacccgatcgatctgatcgaggtaaacctgtagtaattcgaaagtccagtctggtccgtcagtcagacgcttatcttgcgcgcccgttttttcagttgaagttgtcatcagcgcaccctcacggttttaacatctggccaaatacctgtcccttgcataatcctagctcaatctgaacaaactgaagcacggcaagaccttatgtcaatatagtttatttttgccgcgctgggagcatcatcttattcttctatttggcaatattttattctgcattaatggcaatttataagaattaaatatcgtcaaagtcatcttggtcaagttgtggattatttggactataaacagctaacttaatgaatttattgagatatatacctgtttatgatgttcaaaccgaatcttatcgccaataatgtaaatcacttgaaaaacaataagattaaaatataaaataactgtgagcagaatcacaacccacgatcaaattgttggctagttttttacactaagttaattttctgtcagcagaatattatgctttatgtattatcggcggagttaaggtatgcgtattatcattttgggaagtggagtggtgggggtggccagcgcctggtacctggcaaaagcaggcaatgaggtaacggtcattgaccgccaatctggcccggctcaggaaaccagcgcaggtaacgcggggcaaatttcccccggctatgccgcgccttgggcagctccgggcgtaccgttgaaagccattaaatggatgttccaacgccatgctccgctggccatccgattagatggcagcagcttccagttacgctggatgtggcagatgctgaaaaattgtagtacttcccattatatgaccaataaaagccgcatggttcggctggccgaatacagtcgggattgcctgaaagatctgcgcgaagataccggaatccaatacgaaggccgtcagggtggaaccttgcaattgttccggactcagcaacagtttgataatgctgcaaaagatatggcggtattggaggatgcgggcgtaccttatcaattattaaccgctgataaattagcgaccatagagccagccttgtccaaagtgtctcataaactgaccggcggattacgtttacctaacgacgaaaccggcgattgccgtttatttaccgagcaattggcgaaaatggctgaagccgccggagtgaaatttatttttaaccgctcggtagataaattgctggtggacggtaatcaaatcgctggtgtactttgcggcaatgacgtgatcaagggagatgcttatgtcgtggcatttggctcttattccacgtcattactacagggtttagtgtctattccggtatatccgctaaagggttactcgctgactattccaattaccgatccggattctgcgccattttctaccgtgttggatgaaacttataagattgcaattacccgatttgacgatcgtattcgcgtcggtggtatggcggagattgtgggttttaatacccaattggaacaggcccgtcgggaaacgctggaaatggtggtgcaggatttgtatccggatgggggcaaagttgaacacgccacattctggaccgggttgcgtccaatgacgcctgacggtacgccggtggtagggcggacgacgctgaaaaatctctatctgaataccggccacggcactctgggctggacaatggcctgcggctcagggcaactactggccgatatcatttctggccgtcagaccgccattgacgccgatgatttagcggttgctcgttatagtccgggattccattccgcgaatcatggcagtctgtacgcggcgcgttcgattcgctaattttcaaatattgcacaacaagcggctgggtaatatcggcctcttgatgtgcgcgttatttcatagaataaataatccggtaacaattaaaagcccgacaaacccggtaaagtaaaaaggaacgcgcatgcctcgcccgatatctgccacgctgcatttgtctgcctttgataataatcttaatgtcatcagaaattgtgctcctcagtcaaaagtatggtcagtggttaaagccaatgcttacggtcacggcctgagcagagtgtgggaaagtttatccgctaccgatgggtttgcattattggatctcaatgaagcagtcttactgcgtgagaagggttggaaagggccaattctattgctggaagggttctttcaaccgcaggatttgacgttgttggatcattatcgtctgacgacgacgatacacagtgattggcaattagacgctattcaacgagcgcggttaagtgcaccacttaatgtttatcttaaactgaacagcggaatgaaccgcttaggttttccggttcgtcaggctgagacggtctggcaatgggcgaaaagcattgccaatatcgatcaaattacgttaatgagtcattttgctaatgcggataatcctaccggcgtggcgcagcagtttaatgacatcagcgatgccagtgccaatattcctgctccgcgcagttttgccaattccgccgcgacgctttggcacagtcaaactcatcgagattgggtacggccgggtattattttatacggggcgtccccgagtggtaggacggcagatattgcggacaccggtttgcaaccgacaatgagtttgtgtagtgaaatcatcgccgttcaggatttgagcaagggccatggcgtgggctatggcagccgctatcaggccagcgatgctcagcgtattggcgtcgtggcttgcggctatgccgacggctatccgcgtcatgcgccaacgggtactccggcatgggttgagggcgttatgactcgaaccttgggcactatatcaatggatatgatgatggtggatttaaccctttgtccacaggccgtaacaggtagcaaggttgaattgtgggggaaaaatctgccgattgacgacgttgccgccgctgcgggaaccgtgggctacgaattgatgtgcgctttggctcccagagtgccggtgaaaatcgagagttaagcttgaaaattccgatattccgaaacctatcctgaaggcgtatctttatccagatatgccttctttattttgatctcatttcattaatttgttgatatggcgacatgtgaatagtggttataaaacccatttatatcgttattctcccttcggtttttattattgccacctcatctgatttatttatagtggttgaactgctgatcatccgcatgattttatattctgagaataaatgaaatcgaataggagagtattatgtcagttgccagaatagattcactccagttgagaatgaatcagacaagaatactcatcctgtcattaatatctatctctcagctcatgctttgtctgtattcaatattatcactgcggtagcatcggggtttgattgtttattttcaatactagggaaaactattgttgatcaatattatcgacgatctttctatcggctaaccgagacagttttagcgaggaaatatgatgcgccaactcgtgggtctgattacctctgatttatcccgtatggcgcacagccgcgcatgggaaacgctggagcgtaacatggcagccgatgattttcggctggatagcaaggtgaaaaataccaaagaaacctccggtgagttgatgattatcagaacgggtgccgaagccattgtatttccctctggcgttaatgtattaattgaaaatgcagattatctattttattgcttgctccatccgataactcagctatggatgaaaaacaggcggcctgacggttacgatctcaatgttctgtataataatagccaatcccgctatatcatttatatgcagatgaccgaagccatgttgtattacgtacgccgggggtatcgggtcttggttatctatcattgcgatccaaaggccaccgatccagcagtccagtgcgctatttcactggcgcgacgggagcggcatcgagttacgttgcggactatcggtggtgtaatagagccaaaccaggaagaacagcaatatcgggcgggtctcatatccgcgtcagataaccgcgggtttatctatgcgctattcactcgtaagaaagtcatgatggctgttatccattacctattaaataggtctcagccaaactgcgacagaataatctcagtcttggcggattattgcatcgactggaatcgctttattccagatatcgatcatcagattgatacttatttatatccgtggaatggcgtttattgcagtgaagcgccccgaactctattttgcctgctggcttcggttggtacgaataaaggttgtctattagagattaacgggcaccgagttcgtcatttacgttatcgcttcgggacgttgagttgggctgcgggagcagaaaatcctcatcatggctatttgcattttgactggcaggcacaggggcggaggatagtaggatactgttggagaacgggacaacgcagcctagagggtcaacgtattgtcgctttttctgccactctggagggacaggaaaaagtcgaagcaattttatcctgcgaaggacattgtcgcgaaatcattcgaaaattttcaagtggagaaaatgagcctagatttgatttgcctgactgggcgcaggaatttgtgcaaccaatgatacaaccgcgtccccaaggtggggaaagggtgttttgtcattattggcggaaagcagccttggcaaggctggcactgaggttattacaaagtaagtgctaacgtaggataaacattagggcagagtaaaataacggctgatttagcgggttatcaatgatcctctaagattaattatccataccatttattacccgacgagttcacgtcatccaactcattccgcgaaagcggatcgacagagcgatccgcaatcattatcaggcaattttcttgatgatggtcggcatccgcttgctggcactgcgggcaatccacgccaataaacagccggttaacatcaccaacgccagcgaaagcttaggctgaatgggtaatgacatagcgatcagacccaaggcggcaccgccggccatttgcacaaaaccgaccagagcagaggccacaccggcttcattggcgtaaggttccaaggcatagctggtcgccgggcccatcataaaggccagaccggcgcaggcactggcgaccggcaacatgtaagtcggccagctattctgcatttctgcacttaattgtgttaagccaaataataagcctacacaccccaaagccatgagcagactaccggtcatcagacaggctggacggcccactttttgaatgatcctattggcaaagaaactcacaaacataatccagaacccgttggcgccgaaagccagtgagaactggagcggtgtgagattagcctcgcccatcaatacgttaggagccagagacacataagtcagcgccattcccatcgcacccgcgttcaccagcgcaaagaccagaaaacgatcgtcacgcaaaatacgcaaatagtttttgaacggtaagcctttaaccgactgggttcccgctgggcgggtctctggtaggaaaaataccaccaatatcagtaccagaacggcgtatagcaccaagaaccagaagggggcgcgccagccgaaggcttcggctaacaggccgcctaacaaaggcgccagcgcagggacgatattcaaggtgccatttaaaaaaccaaaggctcgggcggcctcgttaccatttaaacgatcgcgcacgccgctaaatgccaccacggcggtgcaacatacggcggttccctgtagcaggcgcgaggcgacaaacatcgttggcgtagtcgctagcgctgccattgcggcacccagcatatacagcagaattccgatgatggcgataggtttgcggccatatttatccaccaatggacctgcgatcagttgcccgacgcccaaaaccagaataaacagcgctatggtggattgaattagtgattcgctgctattcaggcctttggcaatagcgggaatagtgggcaggtaaaggtcgatacccagtgggcctaatagaatcaggctgagtaataaaaacagaaatttttgcatagcagagataaaacgtccaggtgacagaagcggcaagaaacaggaatttggctgagaaagggggctacgtttcggcaacggcgtcacttgtctcagaaaaactcaacctggttagattactacaatcaatgaaatataacctgcaaatagttttaattgcacggtaattctggggaagcggtgcggggaaggattaccgcaccggattgataactctccttttatctacaaaccccgagattagctgatccaattaataacacttggcggggttacgatagcttaaccgaggatatcaccacaggttattttttgtactcacttatgattcgtagcatgtcacggtcggggagcaacttggggtctggatattgccgccaggcgtgcgtaccgccaaaggagcatcgcgggcgcgagtggttaaattgcgattgcggcagcaggtgccatttgccgtctattttaactctcggctgcttgccaggaatgtcataggcggggcgtgtatcgcagtttgcgtgtagcgtatcgtcgacgggcgcttgcatggccatatggctgatgcgatagcatttttcctgattaatcgcgacgcctcgacgttccacttcggcggttaagcgtaatacggatttaccgtcgttattataagtacccagcgcggagcataatgcatctgaatcaaattcagcgatctgtttgtcggtcaaatgaggaaggggaagtgagcaacccgaaatgaataaaaaagccagcggtaatacaactctcatgaaaaatcctgttccataagtcactacaaaaaatagtggtaaataatttcaatactaattaatagtccatttagaattaaccgtattgaaaagtgaggggctagtgtaagtgataataagcagatttattatattaattgccaatttagataaataaaggataaacagaggaaattaatttatggtagtggagtgagttaacccgcgttaggctgatgagtaaccccatcagcttgacgcgtgagcaatgacccattgttccatggcggaagcatccagcggttcggaaaacagatatccctgcccgatgagataaccctgacggctgagcaagttgcgttgcgcttcggtttccacgccttctaccacgacggagagttgcaggctttcaccaatgcggattaccgcttcgctaagcgttctgctggtttcatcgtgctccagatcgtttacgaaactcttatccagcttgatttcatctaattccagtcgacgtagatagctcaggctggaatagccggtgccaaagtcatccattgataacctgacgccctgcttatggatcttatgaagggtggcaaaaatactgggattattatcaatcagaatatcttcggtaatttccaaagttaaatcctgcggtggcagatggtagcgttgcagaatgtgggcgatgatatccggcagccctaaattatggaaattggttggtgataaattaacggaaatagacggtacatcaaggccacgcaggcgccattccgccaactgacgacaggcttcattaatagtccacagcgcgagttcattaattaacccgcattcttcggccaatggaataaaacgctgcggcgggatctccccaagcgttggatgatgccatcggcttaaggcttctacgccgtaaagttgactatcgtgaagtctgacctgtggctgataatagagctgcagggtattgagatgaaccgcttgacgcagcgcgccttccagcgcctgacgctgtaaatttagctggttcatttctctgctgaagaactggaactgtccacggcccatctctttagccttgtgcttggcagcatctgcattgtgcagcagcgtattgatttctttgccattatctggatacaggctaatacctattccggcagaaggaataatggtcaccccggcaatctggcagggctgtgacaggcaacccagcagtttctcgactcgtagcgtggttttatcaacgtcaaaagaggttagaatcaggacgaactcgtcccccgataaacggccaataatatcgtgtttggccatatccccgcgtaatcgttgggcaatggtacacagcaattcatctcccgcagcctgacccaatgaatcgtttacctgcttaaagcggtcgatatcaatcactaatacgaccagcgattgcccttgcgcttcagcttgactaattgcctgatgagcatggttgaggaactgggcgcgattaggcaggccggtcagtgagtcatacagcgccagttgctggattttcatccgtgactgttttctttccagcgccagcgcgcacaggttagtggacagtttgactaacttatggtggaaggcgttagggccgcgtttttcgcgaaagtagaaggcaaaagttcccagcacttctccctggctggataaaatagggctagaccaacaggctaataatccgagtggcagcaaaatatgacggaggcgacgacacaaagggtcgttggcgatatcgtccactaataccggttctttgcgataggctgcagtaccacaagagccgctgtgcgggccgatgggcacccgttgcagtgcgtcggtgtagtgtggtgacaaactgggagccgccaaatgctgtaaggtattatcatcccgcgcctgaagaatactcaccacgacttccggcgcaatgcgttcaatctcgagacaaaacatattcagcacttcatccagcgggcgctctaacactaaggattccaataccttatattgtagtacttcatatattttggtcggggtaatatccgtcagtacgccaatggtataactggctttcccctgttcgtcatagaccgaatttatggttgccgagcaccaatgaggctggccgtcctgactataaaacagttcttccggctgcaacgtttggtgaaggtcgtcggacgaagccgatatcgatgaggaaggcggtttattttgtaatagggcagcaatcggttgccccagtgcctgctgtgcgctgtaaccgaatagtttggtaaaaccctgattaatatacaaggttagctgaccgtcatcgctgccaccggcaataaacattgcgctatcgctgcggtcggtcagttcggtcagcagctgtacccattcatgggttgaggattccagcgccacctgctgagtgatatttttggcgattttgaccattttggcggttttaccgtcgcgacccggaaccggctgataaatcgcggcgagccataccggggagccgtctttatgtcgccgctcaaagcgaccttccagagactggccagcgcgcaggcttttacgcagggcgtgatactctttgctcccgataaaatcgggcttacagaacattttatgggactgtccgatgacttcgtcacgctgataaccaaagtaatcaaggtagttctggttaacattgactaccacgccgttaagatcgaattcgataatagccagagaaagatttaatgcttgcaacagcgcctcatgttcactgtacgcagacagatctttttcagtggggaaagggtcatttaaatggctcatgaggattcctgtagcaatagaagcgcctaggccgttgtatcattaaactaaaatcatcggatatgtaaatcaaatatcactatctatatagaaacagaataggataactgacaaagaaattaaatataataaagtcatttccccaaagaacagactttgtacaacgacaagtagatttttttaaatctgtttagcgtgtatttaacctaccttaggagagaaaccccatggtcataaagagtaaatatagtgcaatatttataaattaattagagtttttaatgcgtattcaatctgtcgctttttatcgactaattaaaagttaaatgaatgcttgttgtcgacagctaataacgcagaaaaaccggctaaaaagataaccattgtttgtaactcattaaattattgagtttttattacgttgatggaaagaataagccccgccagcgctaaaaaggccggcggggctgagatatcggccatcaaagattttaatggtcgatagagctgaaacgtccgccattaaaatctttaatggcatttttgatttcctgctcgctgttcataacaaaaggcccgtaaccgacaataggttcattgatcggttcgccgctgagcaataccaagacggcattattgttggcttcaatggtcagatggctgcccgctgaatccagcaagaccatttccgcttcgcgaccaatgctttcgccattcaccataatggtgccgtgcaagacgatcagtgcggtattccagccttccggcagagaaatttcactgacgctgccctgattcaaccgcatatcccaaacgttcagcggtgaaaaggttttggcaggcccggtatggccgtcgaactcaccggctatgacccgaacacgaccggcgttatccggcagttcaacgcgcggaatatcctgactcaggatcgcctgatatccaggtgcggccattttatctttggcaggcaggttcacccacagctgaaccatttccagcgggccaccgcttttactgaaggcttcggagtgaaactcttcgtgtaaaataccagagcctgcggtcatccattgcacatcgccgggcccgataacgccgcctttaccggttgagtcacgatgttggacttcaccttgatacacaatggtgacggtttcaaaaccgcgatgcggatgttgccctacgccacgcgggtgattgctcggtttaaaatcctgcggaccggcataatccagcagcaagaacggactcagctgcttgccatggctttgatacgaaaacagagaacgaaccgggaaaccgtccccaacccagtgggaacgtggcgcagtgtaaacacctagtacttttttcatcataatctccttacaacaggtaggttgctgtattggataaagtataggtttaggataatttaagcggtagatagcaaaatagcacatcactgtcctattaaatgaacaataaggtgactatgcaagatctcaacgatctttattactacgttcaggtggtcgatcacggtggttttagcgcagccgcgcgagtgctgggtatgcctaaatccaagctcagccgccgtttggcgctgcttgaggacagattgggcgttcgcttggtgcagcgttctacccgacgttttgcggtgacggagatcggccaaacctattatgagcactgtaaagccatgctggtggaggccaaagcggcgcaggagtctattgagttaacccgcgctgagccacgtggcgtggtcagagtcacctgtccggtggcgttgttgcaggcgaacgtgagccagatgctggcggattacatggccagttgccctcatgtgagcgtgcatttggaagccacgaatcgccgggttgatccggtggcggaagctattgatattgcgataagagtacggcctggaccgattgaggacagcgatttagtgatgcgggtgctggccgatcgttgccagagtctggttgccagcccggcgttgctggcgcagtgcgatgaaatccgatcaccggcagatctgaccggcatccccagtttaggattagggcaaccgcagcagaattttgtctggaatttgcaaggcccaaatgatgctcacgcggcggttaatcatcagcctcggtttattactgccgatatggtggcgttgcgctgtgccgcgctggctggcgttggcgtggtgcaattgccgctgatgatggtcagggagcaactagagagtggggcgttgattcgcctgctaccggattgggcacccaaaccggaaattattcatgcggtatttccgtctcgtcgcgggttgctgccttcggttcgtagcctattggacttcctcgccgaacgttttgcgcaaattcacgaaacataatcgccggattatccgccacgccgtagcaaattcaccatattcacgaccgcggtggagcgctcgtggcggcgccaggccagcgtaatctgggtttttagctggtcatcatcaatttcatggtaggtaacattgtttgcatgaatggttgttagtgaacgcggcactacggtgataccaaatccggctgagaccatgccgatggcggaaaccaactgtggcgattgttgccccagttctggctcaaatccggcgcgataacaggcgttcataatggcatcaaacaagccggggccaacttcccttgggaaggtgatcagcttttcatgctgtaaatcccgcaggctgattttggcacaatggtgcagaggatgattggcgggcagcaccagcaccatatcttcttccactagcacctcacaggtaaattcggtactggcgctacaaggctggcgaataaaagccacgtcaatgcgttcgctgtgtaaatcgttcatcagcaccggcatgatttcttcgctaggcaataaaatgaccgcgggaaaggtttctcgatagcggtgcaacaaggataaaaccgccggttggaaagcggtggagctggcaaatccaacccgtagttttcccgtttcccctcgggcgatgcttttggctcgctcaaccgcttcatccgtcaattgcaaaatatgaagggcgtcggcatagaaagcctcaccggcctccgtcagttcaactccccggcttaaccgatgtaacagcggcgtacctatctctcgttccagcttttgaatttgctgactcagcggcggttgcgagatgccgagcttttcagctgcccgggtaaagtgccgagtagaagcgacggcaacgaagtaacgcagataacgatgttccatatatttttgatatcaaaatagtgaggttcctatattggtacttatgtcgttctcgcgtcaaccttataactaaacataagtgtaatttatgttacagataagagggagagcgacatgattaaacaagatcacccagtatgttcatgtgcagagacgattgcgcagagcttcattgcccatcagaaagggcatccagagtgtgttttgtaccaaacctcattgatgagtgcgctaattagtggtgtttacgaaggcaatatcaccatgaagcagctgcttcagcacggtgactttggattaggaaccttcaacaatctcgatggggagttagtggcgttcaacagcgaaatttatcaattgcgttcggacggtagcgcccgtagcgcccagcctgagcagaaaacgcccttcgcagtgatgaccttcttccagccgacggaaaaacgttgttttgagcataaaatgagccgccagcagattcacaatgtgattgatgatgtgaccgagaccgataatctgttctgcgcattgcgtatcgatggcaagtttagccacgttgaaacccgcaccgtaccgcgtcagcagcgcccttataaacccatgctcgaagccattgccgaacagccgacgtttgaattcgagcatcgcagcggcgtgattatcggatttcgcagcccggcttatacccaaggcattaatgtcgcgggttaccacgagcattttattaccgatgaccgcagcggtggcggccatgtacttgattatcaactggaaaacggagagctgactttcggcacgttgaccaagctggtgattgatttaccgcaggacaatgacttcctgaaagcagatttgacgccgttgaatctcgatacagcgattcgcgcggtagaaagttaattccccctgatgggtaatgagagcggtaacaaaggacaacgtcatgagtcatgaaattgaaatgcaggaatggaaatgcggtgccgatctggtggtgaatcatctggagcaacaaggtgttaagcaggttttcggtattccgggcgcgaaaattgatcgggtatttgattcactggaagattctacgattgaaaccatagtggtacgccacgaagccaacgccgcttttatggctggagccattggccgtttaaccggtaaggccggcgtggcattggtgacttctggcccaggttgttcaaatctggtgaccgggctggccaccgcaacgtcggagggggatccggtggtcgctatcggcggtgcggtgaaacgggcggatagcctgaaaatcactcaccaaagcatggataccgtcagcattttccggccagtcaccaaatttagcgtggaagtgaccgccgcgagcgcattgccggaagttatgggaaacgccttcagaaccgcagagtttggtcgaccaggcgccgcctttgtgagcctaccgcaggatattattaatgagccggtaaccagccgtattctggctcatcagccttgcccggttaacgggagtgcgcggacggaagatatcgtcgacgttgcggcactgctcaataaggccaagaatcccatattgttactaggtttaatggcgagccaaccggccaacgccgaggcggtgcgacgcctgctgcgccatagccaactgccggttaccagcacttatcaggcggccggggttatcgatcaggtgcatttcgatcgttttgcgggtcgggttgggctgtttaataatcaggccggtgataagttactgcaacaggcggatgtaattctcaccgttggttatagcccggtggagtacgatccggcgctgtggaacagcggccacgctaccttaatccatctggatgtattaccggcggaaattgacattgcctatcaaccggaaaaagagctggtggggaatatagccaccacgctggatgagctgaccaaacggctgaacggttcgttaatcctgacctcacagaccgaggctgtgctggaagaacgcggtcgccagcgccgtgatttggccaaccgagccgaacgcatgaacggttttgctattcatcctttgagattagttcgtgcgatgcaggatattgttaacagtgacgtgacgctgtgcgtggatatggggagtttccatatctggattgcacgttatttgtatagtttccgtacgcggcagattttgatgtctaacggccagcaaaccatgggggtagccttaccctgggcgattgccgccgcgttggtaaatcctcatcaaaaagtggtgtcggtttctggggacggtggctttatgcaatccagcatggagctggaaacggcggtgcggttgaagagtaatttgttgcacattatttgggtggataatgggtataacatggttgaaatccaagagcagaaaaaataccaccgtccttccggcgtcagtttcggcccgatagatttcaaaatgtatgcggaatccttcggtgccaaaggttttgccgttgaatctgctgatgaattaaccgccaaactgcgtcaggctatggacgttgacggccccgccgtgatcgcgattccggtggattactcagataattaccgtttaatggaagagttaaatatcagtcaactgctgtaggtgaacgaggttagatccgctgattttcataggaataagcagggtagttacagcgttgaagagataaaaaaaccggctgatgtttggccggtttgtatttttctgatcaatcaactttcggcggtttgccggtggaacagttcccggaacacgggataaatgtcttccggttcgcgaatatgctgcatagcgaaattatcgaattgtgcttccaaagcctcgtattcccgccacagggtttgatgtgcgcggcgggtgatttctatatagctgtaataacgcaccagagggagcagctttttcgccagaatctcgcgacatagcggcgaatcatcagcccagttatcgccgtccgacgcctgagcggcataaatattccactgcaccgggtcataacgttcctgaataacttcatccattaactttaaggcgctggatacaatggtgccgccggtttcctgcgagtagaaaaactcctgttcgtcaacttccttagcctgcgtatggtggcgaatgtacaccacatctacgtttttatacgtccggctcaggaacagatacagcagaatatagaaacgtttagccatatccttggtcggttgatccattgagccggaaacgtccatcaggcagaacatcaccgcctgactggaaggttcaggacgacgttcatagtttctgtagcgtaaatcgaaggtatcaataaaaggaacccgttcgattttctgccgtaattcagcaatttcttttctcagacgctcttcttccagcaactgagccggttctgagttttccagtaaagctaattcttcttccaactgatgcatcaaccgccgtttacttgcggtcatcgcggtacgacgcgccagcgagttttgcagtgaacgcaccacgctgatattggccggaaccccatttgccgtgtaacccgcgcgatgtgttttaaattcagtcagctgtttatattggttctttttcaaattgggcagggcgagatcttcaaatagcagatccagatactcatctttggagatctgaaagacaaaatcatcttcgccttcaccatccttaccggcgtttccctgaccactgcccgatccgccgccaccttgctggcgttcaacccgatcgttagtcacaaaatggtcgttaccaggatgaacccggtgacgtgcgccaccgcgtccctgatgaaacatcggttcgttaatgtcgtcgatagggatggaaaccgattcgccgctgtctacgtcagtcacagaccgtttgttgatggcctcggtaatcgactgtttaatctgcgccttataacgacgcaaaaagcgttggcggttaaccatgcttttgtttttgccgttaagtcgcctgtcaataaagtagcccataagtcccccgaatccgatcgacctgaatctcaccttcatctttcgaacggttgttgcgttggcggctttccttcaccccagtcacttagcgggctaaatgactggggggtgttcaattgccgccttgccgccgcccgaaatctcttggggagccccgttatttctcaagctgccgcttgaaatctattgggtttatacctgttatgccgaactgtatcggcaaacgggttatgaagattttcttacccgcagataccattcacacagcaggcgaacttgcttgcgggtataacctttctccatcatccggtcgacaaagtcatcatgttttttctgctcatccgttgaggttttcgcattgaaagagatgactggcagtaactcttcggtattagagaacattttcttctcaatgaccgtgcgtaatttttcgtagctggtccagttaggattacggccattgttattagcccgcgccctcagaacaaaattaacgatctcgttacggaaatctttcgggttactgatacccgctggcttctcgattttctccagttcggcgttcagtgcctcgcgatcgaacagttgaccggtatccggatcgcgatattcctgatcctgaatccagaaatcggcatagataacgtagcggtcgaaaatgttttggccgtattcagagtaggattccagataggcggtctgaatttctttaccgataaattcggcgtatttcggaatcagataacctttcaggtgctccagatacttctcagccacgtcctgctggaattgttccctctcgatttgctgttccagaacatagaacaggtgcaccgggttggccgccacttccgcgtgatcgaagttaaatacgcgcgacagaattttaaaggcgaaacgagtagataggccgttcatcccttcatccacgccggcataatcacgatattcctgataagacttggctttaggatcggtatctttcagactctcaccgtcgtacacgcgcattttcgagtaaatactggagttttccggctctttcagacgcgataagacagagaaacgagccagcgtttccaacgttcctggcgcgcaaggcgcgtgggttaactcactgtgttccaacagtttgtcgtaaatcttgatttcctctgaaacccgcaggcagtaaggaaccttgacgatgtatacgcggtcgaggaaggcttcattgtttttgttgtttctgaaagtgacccattccgattcgttggagtgagccaggatgatgccgttgaatggcagggcagagataccctcagtaccgttatagttaccttcctgcgtggccgtcagcaggggatgcaggactttaatcggcgctttgaacatctcaacgaattccataatcccttggttagcgcggcataatgcaccagaataaccataggcatcggggtcgttttgcgcgtgattttccagcttacggatatccactttcccaaccagagcggagatgtcctgattgttttcatctcccggctcggttttggcaatggcgatctgttgcaaaatcgaaggccaaactttaatcactttaaatttagtgatatcgccaccgaattcgtgcaaacgtttggcggcccacggcgacatgatggtgccgagataacggttaggaatattgtactctttcgccagaatggccgcgtcttcctgcggattaaacaggcacagcggatgatcgttaaccgggctgcgctcgccgttggcgctgagcacatagatgggtacgagctgcatcaaggcttttagtctttcggccagagaggatttacccccgcccaccggacctaataaatagaggatctgtttcttctcttccagcccttgggccgcatgtttcagataggaaacgatttgttcgatggcttcttccatgccgtagaattcttcaaacgcagggtatcgggcaataacccggttggagaatagccgagacatgcgtgaatccagcgcagtgtcgaccatcacggggctaccaatagccatcagcaaacgttcggccgcgttggcataagcactgcgatcctgctgacagacagtaagaaactcctgcagagtgaactcttcgtctttggccgcttcatagcgctggcgatagtgatcaaatatgttcatagcatgcccgtcctgtttgaatggttgggaacataaaaaagtagtagggctttattgggttaaaattttgaaactactaccttattgttatggtcgcgtctgttctaaaggtcaagttggccatggcgatagattgaccaattctgcagtgagggaaggtacttaattagagtattatgctaatattacggggttaactgattgaattatgattcttgctggttttttattctgggaaagtgccggtatactggtgtaatcaaaacgacataaattttacttactttctgttaacagcggtcaaatctatcgcaacctatttatctttgtaatcaatccgcagcgtcagactgcggctttcggtctaaggttggaatgagcgtcgggattgatgtcgtaggtcgataatctgaggacgggaaagaaaggcgcttagagattgatgcgatagcatcatttttatccgcagaagagtaacaataattttcactagttactataattgcttggctaattgcagccgtaaaccgcactgtgattgaaaatgttaccggtttggtaataggcatttcctttataaatcacggagtttttgcctgaatttatgtaaagttccagcagaaagccaacagttgctttacactaaggcaactaattatttgtttacatatggaatagacaatttgtgaaaacctttaaactaaaaactttggctgctgcagccatcgccattagctgtgccagtgctgcacatgccggtacctggtctttaggggcttccgccttagttagcccggatccgtatttgggcaaacaggatcgcgtttatccggttcctgtgatcaattacgaaggtgatgatttttatttccgtactctggctgccggttattacctgtggcgtgatgatagcaaccgtctgactctggacgcttactttctgccgttaaacttcagaccgaatgatagcgacgactggcgcatgaagcagttagacaaacgtcgcggcacgttaatggctggcgtgtcttatgctcataccgaagactggggaattattcgcaccgcgatttcgggggacatgctggataacagtaacggtttgatcggggatgtggcttacctgtataaattccaactgaacaactggttgttgacgccgggtgtgggtgtaacctggaacagcaaaaaccagaacaaatattactacggcgtgagtggtaacgaagctgcgcgtagcactttgagcgcttatgagccgagtgatagctggtcgccttatgctgagttgtctgcacattatcaaattaacgctagctggaatgcattcttccttggccgttatattcaactgtcgagcgaagttaaagacagcccaatggttgataaatcctataccggtatcgtctggaccggtgtgacctatactttttgattaatataatcagatagaatgacaggggccagcaggcccctgattttggttaatttaacgcttaactgacgcttcctcttatcatttccctagcgcgaatggcctattcgcaggcacgccttagatttttttgaagaacaattcgtttaatgctaataatcgtattgatatggattgaatttctatattggcgaaccgtttgaacgaagagttttcaggaaccttattctattttttagacttaatgggttctcatagctatttctgcgttcgattaaacggcgaatctcctatcccatattttaccaataatctggatgtatcctgttgtctatttactcagactaaaacggataagttaatcaggtaggtaaatggttaaggtactggataccagaagaaagttattattttatttatttcacccagttggtttatgtcatcaggacgcttcgttaattcatgatgatcattctcgggagagttacgagtcccgctgattattattttcagtgatatgctacacaggacgcatattaatttaaaggttttggctttcattacattaacgcattagccgaatggatggggattatcgaaaccagtctaaatacaaattataaattctaaagtgtagattcagagagtaaaattgaagtatttaatggaaaggaaatgatggaataaacagtgatgaatttatgttccccgaaaccggctaaagagcgatttatgaatcggctattcgcatattaaaacgacaatctctacgcttttgaaatcaatttcaccgatgcaatagctgctgagcgcaagaaagtcgccatatacatacgaatatatgtggttatctgctacaaggcatagacccatataaaaatggagcaccaggctccattttaacgtactgatattgcgtgcggcggcgttgttaggcgtttttgcggctgcgaattgtcattgcaaggcgagcaggcgcttcatcggccgcgaccatgggttgactgactcgcgcagtttcaacgcaaaacatggttttgtagccatcatttggcatatcctgcatgctgcaagacagctcagggcctgggttccaggcaacaacgtcgctttggtgatgatgatgaatctcaatggttcgtttcagcgccgggtctttaatcaggctgtaaggttccggttgggtataaacccgatctgtctggccgttaaagaccaggtcgccgctttgagcggcgtcgttgattttcaataccttatcgatgtacttctcgcccaggccactaattttaatctggctgatatccccgatttggaaataagtatgcagggcggcggcagcctgataatccccgtgggattccagctccatttcacattcaacgcccagtttgaaacgagcgattaacgtgaaggcatgtggccagtatttacgggtttcgtcgctgtctttcagcgtgaaagtcagcatcacgccgttatcattctcatcgtgcgcggtcagtgtccacggcagaatgcgtgcgaaaccgtgggaaggctgcgccgttggaccgaaccaaggccaacagataggtacaccgccgcgaatcgctacgccgtcggtaaatgcggtattgttgcttagccaaataaccggttgttcaccgctaggctgccatgccagcagatgcgcaccttgcagagcaacggcggcgcgtactttagggtgagaaacgaccacaacgggtaggttgtccagttgacgttggctgatataaggggagatttgttcaacaacgggcagactaaaaactttctcgttcattaatttggccttaattgaaaagtggcagttattcgttgaacctcagattatcgatagtatcacaagcttttctgtttttacctacggcttatatgtagcagattaatcattgatattgcgcaaatttatcggcattgaggcagagaaccgggggaggctaggggcataaaaaaaccgcccgaaggcggtttttactgatttcgacatcaatccattacttggagatgtgggagatcaggtccagaactttgttcgagtagccagtttcgttatcgtaccaagaaaccagtttcacaaagttgtcgttcagcgcgatacctgctttagcatcgaatactgaagtgagtttttcgccgttgaaatcggtagatacaacgtcgtcttcggtgtagcccagaacgcctttcagctcgccttctgaagctgctttgattgcagcacagatttctttgtaagaggcgggtttttccagacgtgcagtcaggtcaacaacagaaacgttaggagtaggaacgcggaacgccataccggtcagtttgccgttcagttctggaatcactttacctacagctttagctgcgccggtagaggatgggatgatgttctgggatgcgccgcggccgccgcgccagtctttgtgagacgggccatcaacggttttttgagttgcggtagttgcatgaacagtggtcatcagcgcttcaacgataccgaatttgtcgttgataactttagccagtggtgccaggcagttagtggtgcaagaagcgttagaaacgatttcttggccagcataagacttgtggttaacgcccataacgaacattggggtgtcgtctttagaagggccagtcagaaccacttttttcgcgccagcagcgatgtgcttacgagccgtttcgtcagtcaggaacagaccagtcgcttcagcaacaacgtcaacgttgacttcgttccacttcaggttagccggatctctctctgcggtaacacggatggttttaccgttaacaaccaggtggccgtctttcacttctacagtaccgtcgaaacgaccatgggtagagtcgtacttcagcatgtatgccatgtaatccgcgtccaacaaatcgttgattgcaacgatttcaatgtcagaacgttcttgagcagcacggaaaacaatgcgaccgatacggccaaaaccgttgatacctactttgatagtcatatattccaccagctatttgttagtgaataaaaggttggttgtaaaattacaaaaaccacaccgagcgtcaagcggaatcgtgtcaattcttgctgcaaatcaaaccaaacgagcgagtttgcacattaatcacacattcctgaaaccattggccacatttctatattggggcgaacccacaagtttaaagggcggggcggtaaattttgcgatttttatcacattaacgcacttcaaaccggaatgggatagagtctaggctaaaatctgctgctttgttgttaattttttgttattattacaccttgttttcgttgactttattccttgtcagagaaccgcacaaatggctaaagaacaaaaccctacaaaacctcttgagcaactgactgatatacagcgtcatgttacgcagaaccacggaaccgaagcgccattttccggcaaactgctgcacaataagcgcaccggggtgtatcagtgcctatgctgccagcaaccgctatttatctccgattccaaatttgattccggctgcggctggcccagtttttacgaacctatcgccgccgactctattcgctatattgatgattattcacataatatgcatcgggtagagatccgctgtggtcactgcgacgctcatctgggccacgtgttccccgacggcccgcagccaaccggcgagcgttactgtgtcaattcggcctcgctgaattttgttgacgatgagagtggcgaacagatagcgggttgaacccttatctcgacgtatttttaatttgcaattttgctgaaaaaacgattcagcaaattattcacttaggaatgcccaatggagcttgatgatttgattgcctccatgacgccggaaatttaccagcgtttgtcgcaggcggtggagttagggaaatggcccgatggtgtagccctgacggcagaacaaaaagagaacagtctgcaaatggttatgttgtggcaagcccggcataacacagacgctcaacatatgagtattggcaccgacggccagatcgtgatgaagagtaagcaggagcttaaacagcaatttgccaagcagccgctgattaagattaaagcgcaataattcaggcgagagccggaaccacactggcgagcatacaaaagcgaaacgggccattccgcctaatgctggtcatttaaggtgaccagcagcctttttatgcgggtactttttacattttgctctgacttcatgcgggtaacttcattcccgtcttaacggcaacatgcaatgtctggcctgttcttaaaatctttttaactctcccggcactgtctgttcccggcgagacccacggcagcgttataagtcgccgcattagcctggttatcgcgcggctaaactcagctatacggcagataatcgcctttcagagggtacgccgttttgaccatctggtagcgaacccaattgtaaacctcatcactcctgccgcatcattccgggtaacctgctgcgaagcgtctaactgtacaactcaaccctatcatgtttagagcttatctaattccgtcaagccgttcggctatctgtgacaatgagactaattgcgcaccggcgctccgcatttcaatcaacgccagctcactgtcttgcggttgcaggttaacaccgcgacagccttcggtaatcacccaggtttcatagcccagggtgagagcatctaacacgctgtatttaacgcaataatcggtggctaaacccatgaccagcagacggttaatactctgcgcttttaaccagtcatccagtgccgttttcgcccgtcgaccgttatcaaagaacgcgctgtagctgtctatctcggggtcctgacctttccgaaatacttgttgaatagctgaactgttcaggtggggatgaaaatcagctcccggttgatgctgcacgcagtgtactggccaccacacttgcgtcagtccattcagatcgccaatcgttcccggttgcgcattggagttaacggcgaaactgcggtggtttgccggatgccaatcctgactggcaataatcgaataatcccgtttttggcacagttcgatagcctgattcgctaccccgatgactttatcgccatcggtgacagccaatgcgccagcggggcaaaaatcattctgtaaatcaattaaaagcagggcggttttcattcaggctccgaagattaaccgacatcggttaattcaccacataggttctgttgcatcaattggcgaatttggtcggcatccagcggctggctgagcagatagtgcaatttggtcaacgccgcttctacggtcatatcaaatccactgatcacgccagcatgagccagagcattaccggtggcatagccgtccatattcacacgaccagaaatacactgagtcaaattcaccactacaatgccacgttcgctggcatgtttcagctcatccaacagttcggctttctgcggggcattacccacgccgtaagaacgcaaaatcagcgccttgaccggctgtagcaagaagttgcgcactaccgcgccggaaatccccggatagatagtcacgaccccaatgggctgcggcgtaatgttatgcacgatcaacggaccgttactggccggagagatgaccgaagttacgcggcgaatgtgtatcccggcttccaataacaccgataggttgggtgaggcaaaggcgtcgaaaccatcggcatgagccttggtggtgcgattgccgcgaaacagtttgttattgaagaacagggtcacttcgttaaccggatagtttgccgccagatacagcgagttcaacaggttggtttgcccatcggaacgcaactccgccaatggaatctgtgaccctgtcactatgaccggtttagccagattctccagcataaaagacaaagcggaagcggtaaacgccatggtatccgtaccatgcaaaatcacgaagccatcataaagatcgtaattctgcttaatgtcatcggcgatgtgctgccagtcttccggcgtcatatccgaagaatcaatcaaaggcgcgtattcgtgaatggtaaaatcgggcatttcaggacgatggaattcaggcatcagcgccagttgacgttgtaaatggccggataccgggatgtaaccctgttcagagcgctgcataccgatagtaccgccggtataggcaacgtaaatggatttcttttgcatgtaagcataccgctgagtgagatgactggattatagggtggctggcgcagaaaaaaagcccggcaagtaccgggctggagatttatctgttatttgcgttgtttatcagcgtacatcaccgcaattcaggcaaagcgcatagcgattctgtggatcgttcagattagtaaagaaacccggttgatcttttaccgccatggcgagcgtggaaactggcgctggcagccaagcttgcagcactgaaggcagcacggcgtgaaccgacgcccccatttgcccaaacagcatatcgatgaagcccggctgatcgacataccagttcagctggtaggttttcagcttagccagctcggcggcttttttcaccgcgtcatcgaagtcgcccagttgatccaccaaaccgttgtttttggcatctaaacctaaccagacgtgtccttgagcaatggcatcaacctgctcaggtgttttatggcgcgaggtagcaaccagatcgataaagttcttataaccattctcgatgctgatttgcatcatctgagcaaattcaggcggcaaattcttggtgacagccacgtcagccagcggcgaagtagctacgccgtcggtatggacacccaaggcacccagcgaatcctgataggtgttgaccacgccgaagatgccgatggaaccggtcagggtgcttgggctggcgataatgtagttcgccggggtggatacccagtaaccgccggatgcagccatcccgcccatagaaacgacaagcggtttgtttgcggcacgtagcgcggccagttcggagcgaatcagctcagaggcgctgacgctgccacccggactatttacccgcaataccaccgctttgattttcggattcaaacgcgcttcacggatttgtgccgcggtattatcaccgcccacgctgccgggcgtttgtggaccatccataatcgccccgttaataaagataacggcgatttcttcaccttgctgcacttttggagcaggttggtaatcgtaaatactgacggagttgtaatcgtttttttgcttgtcccagccgaaagttttgatcaattcagcttctaccgccggacgggaggccaactgatcaaccagtttatgttccagcgcgtactgcgccggatcgccaccaacctgctgcaagccgctgataataccggccgctccggggaacagttgttcaggagtgagctggcggttagcggcaactgccgtcagatagttattccacatgccgccgatccagcgggtatccgcttcacgcgcagccggagacatatcatcgcgaatcataggttccacggcggatttataagtcccgacgcggaaaatattggtcgtgactttcagtttttccagcagagatttgtagtacaggttattgctggcaaagccttttagatccaccgagccttgaggagacaggtagattttattggcgaaactggccagataatattgttgctggttatagctatcacccacggcatagataggcttgccactgtcacggaattcgcgtagcgctttgccaatgtattgcagagaaggctggtcggcaccggcaaaatcagacagggacaaaacgagcccattgatattgttatcggttttagcccgacgaagggtttccaccacgtcgaacagcgaattttcctgcagacggttgctcgatgcccctaacatttcgcgggtgaactgcatcactttattgttcactgccggcgtatctaccaccacaccggtcagattgaccagcagagcaccttttaccggttcaaccggcttgctttggaccatcagataaataccgacgcccacaacgatgaggaaaatcaggaacaggttaagaacgaattctctgacaaaattaagtagacgccaggtccacttgaaaaaaccgctaataattcgccacaaagtgcgcatgtgatctccaacaaatccgagcaagtgggggtatcctaatgacctacaaataaaaagtcagtattaaatcatcagacagctaaacgtattggtcaagctggtaacaaatcctctacttatgttaccgtgctgaaaatgaagatcgttatctggagaagagtatggatgcgttagatttgctgcttaaccgccgttcggcctcgcgtttgaccgcccctgcgccaactggcgaagcgttggaaaatatcattcacgccggtatgcgcgctccggatcatggtgcactgcaaccctggcgttttgtgctaattgaaggagaagggttgggacgtttcagcgaattgctgcaaaaagcagtgcgccatgatggctccgacgatgcggtactggaaaaggcgaaaatggctcctttccgcgcgccactgattattaccgtgattgcccatgtgacggaaaacccgaaagtaccaaactgggagcaggttgtttccgccggttgtgcggtgcaggcaatgcaaatggctgctctggcgcaaggttttaacggtatctggcgaactggctcatggacacatcattcggtggttcgggccggttttgcctgccgtgaacaggatgaaattgtcggtttcctctatcttggcacaccgcagttaaaaggttccagtaaggtgacgccgccggatgtcagcaccttcgttagccacttttaagcctttcccaatgcagcttaggccagaaattggcagcttaagctgcgtttccgtctgctttgtgaccaagctaactgcctgaacagccagcgctacttatcaattccctcggtaagcgctaccataggcgatatgttctttgcctatcataatcagtgttaattaatccgatgatggttaaccgagggaagtgatatatgacatcgccagcgatacgtcttacgcaatatagccacggagccggatgcggctgcaaaatctcgccgaaagtgctggaaaccattttgcactccgatcagcagaaattcttcgatccgcggctattggtgggtaatgaaacccgggacgatgcggcggtgtacgatattggcagcggtgtcggtattatcagcaccacggatttctttatgccgatcgtggatgatcccttcgattttggccgtattgctgccactaatgcgatcagcgatatctatgccatgggggggaaacctattatggcgattgcgattcttggctggccgatcgataaattggcgccggaagtggcgcgtcgggtgattgaaggtgggcgacacgtttgcgctcaggcgggtatttcgctggccggtgggcattctatcgatgcgccagagccgatttttggtctggcagtgaccggcgtggtcagtaccgaacaggtgaagaaaaacagcgccgcacaggcaggctgcaagctgtttttgaccaaacccttaggcattggcgttctgacaacggcggaaaagaaaagtaaattacggccggagcatcaaggcgttgcaactgaaactatgtgccaattgaataaatcaggcgctgattttgctcacattgccggcgttaccgcgatgaccgacgtgaccggtttcggcctattggggcatttaagcgaaatctgtcagggttccggtgtgcaggcaacgctacatttttcggcgattcccaaattgcctgcggtggttgaatatattgaagaaggctgtgtgccgggggggacgcagcgtaactttgacagctacggtcatctgatcgggcagatgtctgatttacaaagaaaactgttgtgcgatcctcaaacctccggtggcctgctactggcagtattaccggcggctgaaaatgaggttcatgccgtagctgagcgctatggcatgatgcttagcccgataggggaactgactgcaccgcgcaccgatcgcgccttaattgagatttgcgaatgattttcccatcgccttcaataccgatactaccgacgtttctttagggccgctaatgcaactgtttattgccgaaaaacccagtctggcccgcgctattgccgatatcttgccgaaaccccataagcggggggacggctttattgcctgtggtaatcaacacgttgtcacctggtgcgtcgggcatttgctcgaacaggcgcagccggatgcctacgatagtcgctatgcgcgatggtcattggccgatctaccgattattcctgaaaagtggcaattgaagccgcggccttcggtcagcaaacagcttaacgttatcaaacagttgttacagcaggctgatgaagtcgtccacgcgggcgacccggatcgcgaagggcagcttttggtcgatgaggtgttggattatctgggattagcggcggaaaaacgacagaatgtgcggcgctgcctgataaacgatctcaacccgcaggcggtagagcgggcagtttctcgtctacgcgataacaaagagtttattccgctgtgcgtttccgctctggcgcgctcacgggctgattggctatacggcatcaatatgactcgcgcttataccattctgggtcgtaatgcgggttacgacggcgtgctgtccgttggccgggtgcaaacgccggttctggggctggtcgtccggcgggacgaagaaattgaagactttgtacccaaggatttctttgaggttaaggctcatattgttacgccggccgatgaacgctttgttgccttgtggcagccaagcgattcctgtgaatcctatcaggatgaggaaggtcgcttactgcaccgtcccttagctgagcacgtcgtcaaccggatcactggccagccggcgcgggtgacatcctataatgataaacgggaatcagaaaccgcacctttaccgttttccctgtctacgctgcaaatcgaggccgccaagcgttttggccttagcgctcaacaggtgctggatgtgtgccagcgtttatacgaaacccacaaacttattacttatcctcgctcggatagccgttatctgccggaagagcattttgccggtcgtcattcggtgttgaatgcaatcagcgtgcatctaccggatttacagccgccagcggtgatggacagcgatcgccgcaatcgttgctgggacgataagaaagtggatgcgcaccatgcgattattcctactgcccgctccagcaaggtttcattgacgcaggatgaagccaaggtctataccttggtcgctactcagtatctgatgcaattctgtcccgacgcgatgttccgcaaatgcgtgattgaactggatattgccggaggaaaatttatcgccaaagctcgttttctggccgaggcgggctggcgtacgctattgggcagcaaagagcgagacgaggaaaacgaaggttcaccgctgccggtggttgctcaaggggacgaattgctgtgtgaaaagggcgaggtggtagagcgacaaacgcaaccgccgcggccttttaccgatgcaagtttattgtctgccatgacgggcatagcgcgctttgtgcaggataaagaactgaaaaaagtcctgcgcgcgaccgatggtttagggacagaagcgactcgcgcgggcatcattgaactgttatttaaacgcactttcctatttaaaaaagggcgttacattcatgccagccctgcgggaagggcgttgatccatgcgttgccggatattgccgctcgacccgatatgacggcgcactgggagtcgactttgacgcaaatcagtgagaaaaactgtcgttatcaggattttatgcaaccattagtggtaacgctgcaaaatttaatttatcaggcaaagcagaaccgaacgcctcaggcgtttcgtggtttaccggctgcgccggccgttccggctaaaaaaagtaaaaaaaccagcgtgaaggcaaaggagagtaaatcatgaaaaaaaccataatgatagggtgcctcgcgttgagcgttttattctgcagcacgacttgggcaaaccgcccaaacctgggaaataacgtggatgtggtggtgcctttgcctccggacatgtggaataacgccggtacgcgtggaaccaataataataactgtccccgctgctgcgtttatcaaaatcagaattactcggaaggggcagttttgcgggtggaaggcgagatattgcagtgtgtgcgggatccgaacgtcaccggaacccatccactgatttggaaacgacttcctcgttaacctatttggttgtccgttggctgataaaggcttccagtaaaggaatatccgccggagccaacggataatttagtgcttgctccggagtgacccagattaaagccgaatggcaatgcatctggggttctccgtaaaattcctctacgcgccaggcatgtaaacaaattctgcgatcgggtaaatctcgctggtggctggcaacgtaaccggaaattttggcgtcaatgtccaattcttctgctaattcgcgtcgtaacgcctgcggctggctttcacctggctcaacctttcctccgggaaactcccacaaaccggcctgatcgctgctttcatctcgctgagccagcaggattttgtcctgatgctgaatgatagcggcaaccacgtcgataagtttcatgaatataatctctcagaggagccattcggcgtataagaattgcgacattccccgtgttgccacggggaaaatagcgatgaaaatagttatagagaaaactcagaccagatcggggcgtgatcggacggtttttccatactgcggatctcgtaatcaataccggtagaaatgcagcggtctgcaagtgattgagtcgctagcacaacatcaatgcgcagcccgcggttttcatcaaagccgcgagagcgataatcgaaccaggagtaacgatcatgacaatcagggttggcggcgcggaaagtatcgaccagcccccagttttgcaaacgggctaaccattcccgctcttccggtaagaacgaacattttccggtgcgcaaccagcgcttacggttgtcttcaccgatgccgatatctaaatccgttgggctaatattgatatcgcccatgattaaaacctgcgcctccgggcttaattctttttccaaatagctttgtagatcctgataaaaacgttcttttgccgggaatttagtcggatgatcgcggctttcgccctgtggaaaataaccgttaatgacggttaaaacaccctgtggcgtttccagatcggccataataatccggcgctgggcatcttcttcatcggttgggaaaccacggcgcactgccagcggttgctgcttggtgagcagagcgacgccataatggcctttttggccatgataaaacacgtgatagccatgctggctaacttcttcaagagggaacatatcatcgtgaactttggtttcttgtagcccaataacgtccggctgatgttgttcgatgatcgccgctaattgatgagggcgggcacgtagaccattgatattaaaagagacaaatttcatagccagcgtcgtttcctgataaaaatgtgcgtgaatagtagcagatatccgataaaaatgtaatgaagtggggaggtggctgagtcgatagggggcgctttgctatagatttacattcagcgatttaaacttgttataggctgtcttattcacaatatagaaaatgtaatgactatgagtgggagtagatgcagttaaggataaactaacatgtattctggactatatatttaagaagtcagttaactatcccatcgttaaatattaaaatcagacttttatatggtgtaatattaaaaatagagagtgaactataatcctcacatctaacatttgccgcgtgtcagttattattttgttgataaattagcttaaaaaaagaatggtaaggtgttggtatttgaataagcctcattatttagtcatcacagataaataaatttatcatttgttatagtgacgtagtaacgttatcagcatgattggcaaaaaataggatttattataaatctggaatttattttgtttctaattttcactatctttattataggtaagccccgcgtttgacaatattttaactaaactatggtagtgaaatgcctcaagaatttttatgggttaacgccgctataatataaaaaataattctgttaatttattttaataggcttcagtgaaatggctttttttaggtcggctaattaaaatactctaacttttttagtagtgctgatcgacagttaaataatcagtcaaatgctaatataccaaattagaaaatcaataaacagccattctggcggtgtgaaaatttgcatatttaatattggttattatctacagctctggctgactatccctatttttatgatgaatattaacgtgtaaatgaataaaattaacacacgattatttttcattcatgaacgaataaaaattattagttaataagcatggaattaagtatcgagttttgttaaaaattatagaacataaactatatatatatttaaaaccaattcatgcatcgctgatgaatattatgatcttaaccgtacttcaaatacataaatgtcattttatgagccacttttacaatacgtgtttactgttcttattttagatttaacctgttgtttttagtgattttttttcaataaaatgaagttgagaaagtttagtgattgtgaaaaaacaatttgtccgggtaaccggtagcatttttaataatcaatggttgaataaaggatggtgaactatgtttttatctagaaaactagaggcatttatggcggttgtggaatacggttctttaagtaaagcggcgcgagttatgaatcgcactacgccacccgtagccaaatcgattaaagactttgaaagtattataggaaagaaactgttcaaaagagaaaaatttggcatgagcctcactcatgatggagaagtgctatataatgatctgaaggatcttcatcagcaagataaagaaattaccagcaaacatcttacggggcatgtttctaatgcggtgaatatttattacgattggggtaaggtggatagcttaacaaaaatatgggaagtggcagagaagaacaatatacatgcaagcattattagattttgctatgaaatgattgatgatatttgtgactttgacggaaatagcttgattatctcttcagagaaaattctttgcgacagattttctctcattaaagaagcctgtgataccggtttgggggtttatgcccgtaaggaaattattggtgaaaattcagatattatcaatttattacgtagcaatacttggctatgcaatccaatactgtataagagcgaatttataaaatcgttagaagaagaggtgaagaagtctgtgagcaaagttagcatcagacaggtagataatttaaattgttgcctgagttttatcaattctggtaattatgtttgtattactgactcgattatcgatagttttgccgtttgtaataaactaggttttgttaaccttaaagatcactttggcgatcataagttctacttttataaatccagatcgcattccagcgtgctcaatgggttaatagactttgtaaaagcaataaactgataagtaaaaattagcgcactgaggtatacagtctggtagtttgtcatgtttgttggcattgattcttgatctatataagactcagatagaggaatatttatatttcttttatcgtggttggcatgctgacaaacattacttttgagtcaatagggatgtaacgcacccagtgtcactttcgcgctgagaaccaacatgtattccatttgggtaaagcatcgccattgaatgagggacgggggtctatcgcattgggttgttcatattgcctctcgtcaaaggtttggcgatagaacgagtttagagcctagcaaaggatagagaggatataccgggtgtcggtggcggaaaatagggtgtggtttggcgaaatttaacctggttaagcacctttttgattttgaaccgaaataaaaaatcattttgaaccgaaataaaaaatctatagtgcgatcttcgtttaaattgacgagtatatgactgagcgcatcctgttcaactctatccaagggctgttaactaaggggaatgctgctcatcttagcttctgcctgaagcgttaaggcctgctagaaggcgaaaggagtttattggtaggataataccggtagttgggggagcatcatttcgttcttcacccttcgggttaccgaagtgcaatgttgtctcacgctgctcgactcaaaccctgtcgaaagttattaccttcgcccaaaatatctaagggtggtttggtgatggggttaataccttggaaatataatagagatggtggtgggggaaggattcgaaccttcgaagtcgatgacggcagatttacagtctgctccctttggccgctcgggaaccccaccactgaattcgtggtttttatttctggctaaatacctggccggtattttttaatgattttgctattcatcttaattactgcgcttggctatttaatattccgaataacctaacaagccagtttaaaatggtggtgggggaaggattcgaaccttcgaagtcgatgacggcagatttacagtctgctccctttggccgctcgggaaccccaccactggcctaactgcttagaaacgttgtctcggtaagcggggcgcatcatatcaaatgaagcgccactgtaaagacttgatttgaaaaaaaagatttgtttgccgtttttttgctcttgaaggtgtttcttcaaacaaaaactaacgatttattgtgcagttacagaataactgtgcgattaccgtaaacaaaaacgcgctgcgctaaaacacgataaagtgcgcggctcagtacgtttttctccacatctcggccagcacgcatcatatcttcagcggtataagaatgatcgacgtggataacgtcctgcatgataattgggccttcatccagactgtcatttacatagtgagccgttgccccaataattttcacgccgcgttcataagcctgatgataagggcgtgcaccaataaaagctggcaggaatgaatgatggatattgataatttggtatggatagcgctgtacaaaggcaggagttaatacccgcatatatttggccagaacaacataatcaggttggtattggtcgatctgcgtaatcagctgttgatcgtgttgatcccgagttaatccttcatggctaaccagatggaaggggatatcaaaccgctcgaccaggtgtcgcaatgaatcatggttaccaatgacggcggcgatttctacatccagtccaccataagcgcttttcattaacaggtcgccaaggcaatgagcttctttggtgaccatgataacaatgcgtctgcgccctgcagtatgcagctcgcggctggtaccttcgggcagtgcatcatccaaatcggcgagcaacgttgtgtcgttaaagatcccttccagttcggtgcgcataaagaagcgcccggtcagatgatctacaaactcattattttgaacaatattaagctgatgcttgtaacaaatattggtgatcttggcgattaaccctttggcatcaggacaaatggtacgtaatacttttctttgtatattctggtgtggcataagttggtcaatcctgtctgagatatctttgatgttgtgttttaattcgatgcagccagattaggcacgtttaggcgtaaatcatccgcagcatttcttatattttttgcctgaaccgcaaggacaactgtcgttcctgccgacctgagggcgtattccatcaatatagtaccagcgttcatttaaacgaaggaagcgcgaacgttcatgcatcatcgaaatggcaccgctattgccttctttaaatcgggcaacaaactcgacaaatccttcatctggatgggaaccggccgcttcttctctaacggttaaacccaaccactgcgtgcctgcaaaaccctctgcgatattgtcacgccatttttctgcatggcaatcgggatgccaggtacctaccaaataattgacgtcttctttgacataagcgctgtagcgcgaacgcatcagaatgccaggcgtagctgctactttagcgccgagaatatagggttcgcagcaaagttcgtaatttatacggcttccgcaggggcaagactctgtcaaaatatctcctgataacataattaaattcgcgtaatgcaatctcttcgtggcaaggttgtgtaatgacgattgcctgacgcaattttccaggatgtgcacaggaatgattaaattgtgcagatcggtccaatttgaaaggtttcagccgtatatcttacctaatcaccccccaaggttcaaaggcatggacttaaaatgggaatcgcgtgtcctgtgttttttattgtgatgccaatggctaaaattgaccggtgtttcattttaatgtaaattgcgttttgtgatttagatcacattgtaatggcgaaattgaaaggtcaaaatcatgaagttaatcaatagaatcatcgcgatgttcgaaaacatgcatatctctttcggcacattcaacgcctaatcattttctggcgtttttacccaggcctgatgaggtctgggtatcatttaactcaactcgctgatagtgagtcgtattctacgattccgatagtgttcttcatcttcactttgcctcatccctcaactcccccaggtaagattccgtcctcagattgtgctccatataaacgttaccgtctcattaaacgggtgggttatcgagatgcctcgtagcaattattctctgttgcaatacgattaactttctctgtgagactccgtgcaaaatgcaagattagtcacgattacttacagccaaagattggattgttcacttatgatgctgtaattcagcgattagaacgcgatggttcgatgataatcagggttataaattgctcgataattcatttggttaatttgatgaatcagatggcagagtgatgactaacaaggatgttagctgtatctcactaatgagaattaatgaaattacaactaatgaaagcgtgcatgatgctaagtcctgtgggcagtatagccaaatagacgctgttaatagttttgagcatagctgacgttggttgcgaaacgggaaccgtattcgagtgagatataccgaaacacatgcgagtggataatgcgacaaataaaggtaggtttagctcttggtgcaggtgcagcaaaaggatgggcgcacattggtgtgatcaatgcgctgaaaaagctggatgtggaaattgatatcatcgccggttgttcggttggtgcactcgttggcgcggcgcaggcgacccagcacatgccggaactggagcgttgggtcagatccttcagctattgggatgtgattaaactgatggatttttcatggcgaaggggcggattactgcgaggtgaacgtgtatttaatacggtgggcgaacttctttcaatcgatgacatgagccagtgcgccattccttttggggcggtagcaaccaacctgagtactggtagagagttatggcttactgaaggcaatatccatcaggccattcgtgcatcctgtagcatgccgggattgttctcccccgtttggcttgacggctactggctggtggatggtgcggtggtgaatccggttcctgtttcattgaccagggcaatgggggctgacgtggtcattgccgttgatttacagcacgacgcacatcttatgcagcaagatctgctttctatcagtatgccaacggaggaaactccttccgatatgccacaaaactggcgcagtcgcctacgtgatcgcattgcccatctggcaccaaaacgttcgaatacgcctccgagcgcgatggaaattatgtctacctctatccaggtgttagaaaaccgcctgaaacgtaaccgtatggccggcgatccacctgatgtgctgattcaaccttattgcccacagatatctactttagattttcatcgggcgaatgaagccattgctgccggtgaatcggcggttgagcgcaaacttgagcaattagtgcttttagctaaaagaagaggaaaaacacagaatggaaataaaaattgacgtcatggccacttctggcaagcacaagtcacctttttgagccactattagcacaacgatagctaagagataacattgcatggacaaaccgtttacagataagaacattttgattgttgaagatgaaatggtctttcgcacggtactgaataattatctgagcaacctaggggcttcgatattacaggcatcgaacggtcttgaagcattgaatttgttggaaaacagtatgcctgacctgattctctgcgatttggctatgccagaaatgggagggattgaactggttgagcaactgctggttcgggggattaaaactccggttctggttatctcagccacagacaaaatgacggatatcgcgcaggttctacgtttgggtgtaaaagatgttttactcaaacctatagatgatttacatcgcctgcgggaagcggtattgacttgcctgtatccgacattgtttagctctccggcgattgaggaaactgaacttattcaagactgggatgcgctgaagaaaaatccgtttgaagccgctcagttactgcatcagttacaaccgcccgcgcaacaagttattgctcgttgccgcgtgaattaccgccagctaaccggcgttgatcaaccgggattggttttggatatcgccgcactttctgatagcgatttggctttctattgtcttgatgtcactcgagccggtgataatggtgttctcgcggcattattactacgggtgttattcaacggtatcttgcaagaacacttagccggtcgccatcaccgtctgccgcaaatgccggcgttgcttaaacaggttaaccaactcttaagacgagcccatcttgaagggcaattccccctgttggtcgggtattacaattcggaatacaaaaacttgatcctggtttccgccgggctgcatgctaatgtcagcgcgggtaaaaaccatatacagctgagtaatggcgtgcctttgggaacgctgagaaccgctcatttaaatcaaatcagtcagcgctgcgaggcttggcagtgtcaggtatggggagggggcagccaattaagacttatgctttctgctgaataatattcattatgcttatttaccattcgtcatccattatccccactgtcttatttccctcccttttttaagtctcgtatgtagcctattttttgaaccaatgaaaagaaactctgacctgtaaatataagtcagcttatatccttcgtttttccgttgattgctacacttcaattgccgggtcttaaggttacgttaatgcttctctcttaaactacgcttaatggctgacagcatgcggaaatagtcatgcccttcgtggcggcttaggctattgaaaatcgcaaactaatcatgcaacaccggattaatcgcccatgttgaatctgaaaatgttaacgatggttgataaagcattaatacagactgtgcaattgtgtgctgctgccagcagtagccactaacgtaccagggtttttattcatctaccttttattctagtggtccgagagttcggtgaatcgccgctgcaaacggtttgtatcgtttcgacaatgtgtcattagcgcaatacatgtagcggtatgctctggcttatttattaaacattcgatcgctaaagatgattgaaagtttcgtggctaacaattggttttcgatttaaacggttagggtaaatataatgaaagtaaccatttttggtattggctacgtcggattggttcaagccgcagtatttgctgaggttgggcatgatgtactttgtattgatgtcgatgcacgtaaggtagaaggcttgcaaaaagggcatctgccaatttttgagcctgggctgtctactttggtaaaagaaaacgttgaggctggtcgtctgcatttctctacggatgcgaaagctggtgtacatcacagtgccatccaatttattgctgttggtactccgccagatgagaatggtgccgcagatttgcaatatgtgattcaggtttcagaaactatcgctaaatatatgatggaacctaaagttatcattgataaatccacggttccggtgggtactgccgataaagttcggagtgccatggctgcagttctacgtcagagagatatagagatcgactttgatgtgatatccaatcctgaatttctgaaagaaggggcggcggtatccgactgtaagcgccctgagcgtatcgtaataggtactgacaataatgacgtgattccacttataagtgagctgtatgagccatttaatcgtaatcacgaccgtatgctggtaatggatgtgcgcagtgctgaactgacgaagtatgcggctaactgtatgctggcgacaaaaatcagttttatgaatgaaattgcaaatctggccgaactattaggcgcagatgtagaaaaagtccggcagggtatagggtcagattcgcgtattggctatcactttatatattcaggctgcggctacggtggatcctgtttcccaaaagacgttcaagcattaattagtacagctgagaatattggttatcaaccaaaactgttacaagccgtagagcaagtcaacattcagcaaaaatccaaactgactcagtttattaaaaaacactatggcgataacctggctggaaaaacttttgcgctatggggactggcatttaaacctaataccgatgatatgcgtgaagcgccaagtcgtgttttgctggagtcgctgtgggaggctggtgctattattcaggcttatgatcctgaagctatggacgaaactcagcggatttatggttcgcgtgacgatttgagattaatgggaactaaagaagctgcgcttcagggggcagatgcgttggttatttgtaccgagtggcaaaactttcgagctccagattttgacgttatcaaatccagattgaaagaagcggttatttttgatgggcgtaatttgtacgacccggagcgcttaaatagccggggctttatttattatgccatcggccgcggagcatcggttaatcacgctaactcgcgctaagtaagaacattctgagcagcggtatgttttacaacggcatactgctgcattttctgatttttctatccacgttaaaaccgtaaattttcttctgaataaatctgacgttggtaaaactatgacgacactttacctgaaatttaaaactaactattaatattgttatagattagcagagtattcttatggatttgctatgaaaatgataacggagagtaatttatagagaagtgtaatgattggtaagaaattgggaattttttctgggttaaggatcgtttttaaaacccaataaaaaataccctcaacataagaagagggtatttctcagataatagtaaatgtttaaatactattacagtaggaaatcgtccagcgatttaccttgttcatcgagagctttcttaatcacagctggagtacggccttggccggtccaagttttcagttcgccattttcatcagtatattggtatttagctgggcgagctgcacgtttagctttgcctgctgctttagctgtacttaaagtggccatcagctcgttcgggtcaataccgtctgcaataagcatttcacgatattgcgacagtttacgctcacgttcttcaatctcagctttagactgacgttcttcttcaacacgctcttcaacaactaccttcagcttctcaagcatttctatcaatgtatcaacgttacattcgcgcgcttgagcacgtagagtacggatgttgtttagaatttttaacgcttcgctcattgtcctggtctcaattataatgttggggggcgtctggataataatagagtgctattttaatttctgcaatagccaatttgattagcttactggaatttactctttttaaaagctgaaagttgtctatcgttagtaataagtgatgagttcgggcaattagtttgcacagttctaagacaaattctcgatatgtgagtaaaagttgcaattttagaacatgattttctcactaagctataagtatgctttatatcaataaagcaaaaaatagagcgttgttgattgtgcttgctcgtttacaaccatcgaaaaaaatgtggatatagatgacaaaatcgactttgccaaggatacctttaaccggataaagtcgcaacgacactaataaatatgtctgttaggtatttaatgttaatttctatcgctgccatgatgcatgggattaatgagtaaaatgggctattgttgaattcgatgttttttttggtttttactccttttagtacagccccatgtttggggaaaatctttaagcgcgatgaaactgtgaactcagtcaaaaaatagcatcgaatggattcttaaatcagtccaggtaaaagaagccggaatgctttcatcgcattactcaatttattaaacttattaacctcctgcatcccctgtcagcttgcgcataaagtttgtgttacactatggcatatcgttaatttgcgcttttaatataccagtggagttacgggcccatggctcagctttatttttattattctgcaatgaatgcagggaagtccaccgcattacttcaatcctcctataactatcaagagcgtggtatgcgcacactggttttcacggcagagattgataaccgtttcggcgttggcaaagtcagttcacgtatcggcctaacctctcaggctcagctttataataatgaaacccaattggcggccattatagaagcagagcaccatgataagccggtgcattgcgtgctgctggatgagtgccagttcctgaccaaagagcaggttaggcagctttgccacgttgtcgatgaatatcatattccagtcctttgctatggcctgcgcaccgatttcctcggggagttatttaccggcagtaaatatttgctggcctgggctgataaattggtggaattaaaaaccatttgtcactgtggccgtaaagccaatatggtgctgcgattagatgcgcagggcagagcggtgcatgatggtgagcaagtagtgattggtggtaacgaaagctatgtttccgtttgtcgccggcattataaagaagcaatcagtgcggcctgcacgccgttagctgggcagggcgatatttaatcctcgagaatccccctcagaagccccatggacgttttttttgtcgccgtagggtgacttacctttttgtctttcctcgtattagcattctgttgacgtcgtttgaacctaaactcaatggcacagacagatacgttcgttaatctatgtaccttagccgatgaataataggaatagcggcagataattatgatcgggtcgatattcactatgagtctcgatgacggggaaataatgggtagggtttgacaatgttgctgcacaagaaaaccccccaatcagatttaccgattgaggggtagacagtttgctgattacccaccgttagatgagcagtgcagtcaaatgattacttcttggtctttttttctgctttaaccacttcttttgcagctgcttcttcacgttcgaattcttcgacgtattcgcggccataataagtgtccatcagaatctgtttcagctcagagatcagcgggtaacgtgggttagcaccggtacactggtcatcgaaagcatcttcagacagtttgtcgaccttcgccaagaagtcagcttcctgaacgcccgcttcgcgaatagaagtcgggatacccagttcggctttgatttcatccaaccaagccaacagtttctcgattttctgtgcggtacggtcgccagcggcagccagacccaagtggtcagcgatttcagcgtaacgacgacgtgcctgtgggcggtcgtattggctgaaggccgtttgcttagtcgggttgtcgttcgcgttataacggataacgttagagatcaacatggcgttagccagaccgtgcgggatgtggaactcagaacccagtttgtgagccattgagtgacagacacccaggaaggcgttcgcaaacgcgataccggcgatagtcgctgcgttgtgtacacgctcacgtgcaaccgggtttttcgccccttctttgtagctggctggcaggaattctttcaacagtttcaacgcttgcagcgcctgaccgtcggagtattcgttagccagtacagagacataggcttccaaggcatgagttaccgcatccaatccgccgaaggcgcacagggatttaggcatattcataaccaggttggcatcaacgatagccatatctggagtcaatgcgtagtcagccaatggatatttctggccggtagcatcgtcggtaacgaccgcaaacggtgttacttctgaaccggtaccggaagtggtggtgacggcgatcattttcgctttcacgcccattttcgggaacttgtagatacgtttacggatatccataaagcgcagcgccagttcttcgaagtgagtttccggatgttcgtacattacccacatgattttggccgcatccatcggtgaaccgccacccagcgcgataatcacgtctggtttgaaggagttcatctgctcagcacctttacgcacgatgctcaacgttgggtcagcttcaacttcgaagaagacttcggtttcgataccgtgagatttcagcacgctggtgatttggtcagcgtagccgttgttgaacaggtagcggtcagtcacgatgaaggcacgttttgcaccgtcagttgccacttcttccagcgcgattggcagtgagccacggcggaagtaaatagatttcggtagtttatgccacaacatgttttctgctcgcttagccacagttttcttgttgatcaagtgtttcggaccgacgttttcagagatggagttaccaccccatgaaccacaacccagcgtcagagacggtgccagtttgaagttgtacaggtcaccgataccaccttgtgaggcaggggtgttaattagaatacgggcagtcttcattttatcgccgaagtatttcacgcgagcagtctggttatcctggtcggtgtacaggcaagaggtgtgaccaatcccgcccatttcaaccagtttttccgctttatcgactgcgtcttcgaagctcttcgcacgatacatcgccagagtcggggacagtttttcatgagcaaacggctcggattcgtccacaactttcacttcaccaatcagaatcttggtattgcccggaaccttaataccggccatttcagcaattttagttgctggctgacctacgatagccgcgttcaggccaccgtttttcaggatgatgtcctgaacggctttcagttctttaccttgcagcaggtagccgccgtgggaggcgaaacgttcacgtaccgcgtcgtatacggaatcaacgacgataatagattgttcagatgcgcaaatgacgccgttatcaaaggttttagacatcagaatagaggctacaacgcgtttgatatctgcggtttcatcaaccacaacaggcgtgttacctgcgcctacgccgatagcaggtttaccagagctgtaagccgctttaaccatgcctgggccaccggttgccagaatcaggttgatatctgggtggtgcattagttggttagataattcaacggtaggggcatcaatccaaccaataatgtcggctggcgcacctgcagcgatagcggcttgcagcacgatatcagcagctttattggttgcgtctttagcacgaggatgcggagagaaaatgataccgttacgggttttcaggctgattaatgccttgaaaatagccgttgaagttgggttggttgtcggcacgataccgcagattaaaccgataggttccgcaatagtgatggtgccgaaagttttgtcctcacccaagatgccgcaggttttttcatctttgtaagcgttatagatatactcagatgcgaagtggtttttaataaccttatcttcgacaatacccatgccagattccgctacggccaatttagccaaagggatacgggcatcagcagcggctagggcggcagcgcggaagattttatcaacttgctcttgagtaaagttggcatactcgcgctgggctttcttgacgcgtgctactagctcgttaagttcagcgacattcgttacagccataatgctctcctgataatgttaaactcttttagtaaataagcagttgaagcaactagtatagtcaggctatctcgtgctgcattgtcgaataggaagacttttcgcattctactcaaccattactaccgctgatttactgaaagagctttctttatttttgtcggggtgcggatttgaagctaaccacaactgacctttccaagctctctacctcttttcctatgacagagcttaactattcttaggtatggatttcgtgatttaaatcacaaaaacgtcaagctgacacctttcagcagcgttgaattgagaattaaaagcattaaaaccataaaggcgatattttatgacgttaaaacagcagaaaagacacactttgttaacagttgctcgcctattttttgagtaaacttattgcgtattaaaatgctgatctaatccatagattccccaatgtaattccattacattagcgcgcatatagatgaaggctgtgcgttatgccagtccggcagccaaaataactgcctgaatggctccaagcggcgggtttcttctgtagtagcttgtagtcgcgccgtcacctgagcaaaaactggtcagggaggcgctaatcgacggacattaaccgctaatggtggttattgcgccgaggtactttatattagcgatagtgcggagtgggtgtgagtcaatcactgttggacctgtcaggctacatcaagttttttgttggcttgtttgcgctggttaacccggtaggaatattgccggtatttattagtatgacgagttaccaggcagaagcggggcgcaataagacaaacctgacggcgaatctttccgtcgccatcattttatggatagcgctattccttggggatgccatcctgaaagtatttggtatttctatcgattctttccgcatcgccggcggtattctggtagttagcattgcaatgtcgatgattagcggcaagctgggcgaggataagcaaaacaagcaggaaaaaaccgaaacggcagtgcgggatagtattggcgtagtacccttggctttaccattaatggcaggcccaggggcgatcagttcgactattgtctggagctcccgctatcacagttggctaaatttgctcggtttaactcttgctatcgccttatttgccttctgttgctggctgctatttcgcgcggcgccgctattggtacgcttgctagggcagaccggtattaacgttatcacccgaatcatgggtttgctgctgatggcattaggtatcgagtttattgttaccggtttaaaggccagcttccccggcttactttaatttaattaatttaatctcgcgatgataccggctggccgacctatatcctcggctggccggtttccttcctctcgctttcattttttgttttatttcccacttatccggttcttcaatatccctgtattttcctaaaccccatcccgctgcattaatttggtgcgaacagtgcattaattttaaccagatgcactttaatgtggcgtaaataaagctctcctgcctttaaactgacttaaagcctatttatctgtgtttacgcactggcatcagcgccgtttgattaaaataaatccgtcatttgttgttaatttgctcacatgattctgtaatgcttgtgtggaatttatctagatgttattagtgattaagacaacatatccagatgtttattctgggaatggtataaatgttaattttatgtttctttctgcgggttgtgcgaaatttcattagttcaattttttccttccctctgaattaatacagttaaatcagattgttgtgtaacttgttgggtggagttaatactatgaaagattactcactcaatgtaagaaaagagaattgcttaacatttctgtaaaaattattggcgtagattttctgcttctgttagctttcgaaccacttccgaatgagatttttctgtgttctctgcaaaaaatgagcatggatattgcaaggaaatgagcagtgcagcgcggtattggctccagactgaccctaaccattaaaaaaaacatcataaatttggaaaaaggactattggacatgcagataaatttgaagcgtaagccattaacagtacttagcactattctgagtttatcttttccttgtatggtcggtgccgcaactgttcctgccggcgttgaattagccgcaactcaatccatcaccattaataacggcgcagaagttgcgtcgctcgatcctcataaagttgaaggcgttgcggaaagcaatgtgattttaaatttgctggaaggtttggtgagtaatgacgccgatggccatattatccccgccgttgcgactcattgggaaaataaagattttaaggtttggactttccatctacgggatggcgcggtttggaatgatgggtcgcccgtgatcgcagaagattttgtgtacagctggcagcgtttggctgatcctaaaataggttcgccttacgccagttatttgcagtacgctcaaattgaaaacgttgacgatattttaaaaggcacgaaaacgccgggcactttaggcgttaaggcattggatgctaaaacgctacaggtcacattaagtaaacccgtaccgtattttgtcagtatgttatcgcatacttcaatgaagccagtgaatcgggctgcggtggaaaagtttggcgataaatggactttgccgggaaactatgtcggcaatggtgcatacaatctgaaagattgggtggttaacgaacgcattgttattgaacgtaatcctacctattggaataataaagcgacagtgattgatcaggcgacgttcttgccaatagcctctgaagtgagtgatatcaaccgttatcgtagcggtgaaatagatattaccagtggtgctatcccgccaactttattcgccaaaatgaagcaagatctgccaaaagaagttcacgtaagcccttatctctgtactttctattatgaaattaataatggcaaagcgccgtttaccgatgcgcgcgtgagaaccgccattaaattgacgctggatcgggatgtgatcgccaataagattatgggacaagggcagatcccagcttacggatttacgccaacgtttatggaaggggcgaatttcacattgccggagtgggcgggttggtcgcaagaaaaacgtaatcaagtggcaaaacagctattggccgaggctggatataacgataaaaatccgttgaagttcaatttgctctacaacacatcggatcagaataaacagcaggcaattgctgccgcatctatgtggcaaaagaatctgggtgccaaagttactttgcagaatcaggaatggaaaacttcgctagaaagccgccatcaaggtcaatttgacgtggctcgagccacgtggtgcgcggattataatgagcctagcgccttcctgaatatgctgttatccgacggtagcaataataccttcttctataaaagccctgaatttgacgctattttggctaaaacgctgaccgcgtcggatgaaaaagcccgcgccacgctataccaacaggcagaaaatttactggataaagattcggtgatggttccggtgtattaccgggtcagcgcccgacttattcggccaacggtaggcggttttagcggaaaagatccgcaggacgctaccgatataaagaatttgtatatccgtaaactctagcagagtcagtaatatcgtagtaaaaacaatgatggcagtgaaatagggatgtatgacgcagcgtcagtgcggtgttaatacatgtggggtcttacttcctgtggattcgttcctccataggggtaaataaaaaatgccttttaaaaggtgaggcgtattcagtcactggataacgcaataataaaaaactggagttaagataagtatgaccaacatcacaaagaaaagtctcctggccgcaggtatcatcgccgctttgggtatagcgtcggtcagcagcagtttcgccgctgacgttcccgccggcgttcaattggcagaaaagcaggttttagtccgtaataacggttctgaacctcagtctttggatccgcataaaattgaaggcgtgcctgagtcaaacctgtcccgtgacctgctggaaggcgtagtgatcaactcgccaaacggtgatattgttccgggtgtggcagaaagttgggataacaaagactttaaggtctggactttccatctgcgtaaagatgctaaatggtcaaacggtgaccctgtcactgcgcaagacttcgtttatagctggcaacgactggccgacccgaaaacggcttccccttacgaaagctatgtgcaatatgcgcatatcgcgaatatcgatgacattattaccggtaaaaaacccgctgacacactgggcgtaaaagcgctggatgatcatacgctggaagtcactttaagcgagccggtgccttacctggccaaattgctggcgcacccgtctatgtctccggtgaataaagccgtagtcgagaagtttggcgacaaatggactcaaccaaagaacttcgttggcaacggtgcttataaactgaaagactgggtggttaacgaacgcatcgttctggaacgtagcccaacctattgggataacgaaaaaaccgttatcaatcaagttacttatctgccaatttcttcagaagtgactgatgttaaccgttatcgcaccggtgaaatcgacatgacctataacaacatgccgatcgagttattccagaaactgaagaaagagatccccgatcaggtacatgtagatccttatctttgtacttattactacgaaatcaataatgcgaaagcgccatttaccgatgttcgcgtgcgtgaagcattgaaattaggtatggatcgcgacgttatcgttaataaggtgaagaatcagggcgatctgccagcctttggtttcactccgccttataccagcggtgccaatctgaagcagcctgagtgggcgagctggacacaagaaaaacgtaatgaagaagcgaaaaaattgttggccgaagccggttataccaaagataaaccgctgacattcaacctgttgtataacacttctgatctgcataaaaaattggctatcgccgctgcgtctatctggaagaaaaatctgggtgtggacgtgaaactggagaatcaggaatggaaaaccttcctggatacgcgccatcagggcaatttcgacgtggcgcgtgccggctggtgtgccgattacaacgagccttcttccttcctgaatatgatgctgtctaacagcagcaacaataccgttcattataagagcccggcctttgacaagctgatttctgatacgctgaaagtgaaaactgacgaagagcgagcggcgttgtatcagcaggcagaaactcagttggataaagattctgccatcgtgccggtgtattactacgtgaacgcccgtttggtgaaaccttacgttggtggctacaccggtaaagacccgctggacaacttgcacgttaaagatctttatattatcaagcattaatcattttgagggcggtttcctatgggaaactgcccttattgtttcgataatataaagccgtagtaaaaggctaaagacacaggtacgggcaatgttaaagtttattttacgccgctgtttggaagcaattccgacgttatttatactgattactatttcattctttatgatgcgtcttgcgccgggaagtccatttaccggtgagcgtaatcttccgccagaagtcatggccaatattgaggcaaaatatcacctcaacgatcctatctataagcagtatttcaactaccttggccaattggcgcaaggtgatttggggccttcattcaaatataaagattataccgttaacgatttggtggccgcgtctttcccggtttccgccaagctcggtcttgcggcctttattttggccgtggtgttgggggtgagtgccggcgttattgcggcgttgaatcagaataccaaatgggattatacggtgatgggctttgccatgaccggggtagttatccccagtttcgtggtggcaccgctgttggtgctgatttttgccatcatgcttaaatggttaccgggtggcggttggaacgggggcgcactgaaatttatgattctgccgatggtggcgctttctctggcttatatagccagtatcgcgcgtattacccgcggttcgatgattgaagttctgcattccaactttattcgcaccgcgcgagccaaaggtttgccgctacgtactattgtattccgccacgcattaaaaccggcgctgttgcccgttctgtcttatatggggccagcgttcgtgggtattattaccggctctatggttattgaaaccatcttcgggttgccggggattggtcagctgttcgtaaacggtgcgttaaaccgcgattattctctggtgttgagtttgacgatactggtgggcgcgttaaccattttatttaatgcgatcgttgatgtgctctatgccgttatcgatccaaaaatccgttactaacactggagctggcctattatgttgagcaaaagaaatagcgaaacgctggaagctttcagtgaaaaactggaagtagaagggcgtagcctttggcaggatgcccgtcgccgttttgtacataaccgcgcggcgatcaccagtttggtggtcttgatgttaattactttatttgtgattctggctccaatgctgtcgccatttgcctatgatgataccgattgggccatgatgtcggccgcgccgagctttgaatccggccactattttggcaccgattcctctggccgtgacttactggttcgtgttgccatcggtggacgaatctcgctgatggtcggtgtcgcagcggctctggtcgccgtggtggtcggaactttgtacggttcactctccggttatctgggcggaaaaatcgactccctgatgatgcggttgctggaaattctgaactccttcccgtttatgttcttcgtgattctattagtgaccttcttcggacagaacattttgctgatctttgtggcgatcggcatggtttcctggctggatatggcgcgtatcgtgcgcgggcagacgctaagcctgaagcgcaaagaattcattgaagcggcgctggtgggcggcgtatcaacccgcaatattgtggtgcgacatatcgtccctaacgtattgggcgtggtggtggtttacgcttctttattggtaccgagtatgattctgttcgaatccttcctgagcttcctcggattggggactcaggaaccgttaagtagctggggcgcattattgagtgatggagccaactcgatggaagtctccccttggttgctgatgtttccggcgggattcctggtgattacgctattttgtttcaattttatcggcgatggcttgcgtgatgccctcgacccgaaagatcgctgaggaatattgccatgtcgattacgaataatcagtctgccaatccacagtccgttttattggatgtgaaagacctcagtgtgactttctccacgccggatggcgatgtgacggcggtgaacgatctgaacttcgacctacgtgctggcgaaaccttgggtatcgttggtgagtctggttcaggtaaatctcagaccgcatttgctctgatgggcctactggccagcaacgggcgtattggcggttcggccaaattcaatggtcgggaaattctgaatctgccggaaaaacagctaaaccggatgcgggcagaggaaatctcgatgattttccaggacccgatgacatcgctgaatccttatatgcgcgtcggcgaacagctgatggaagtgctgcaactgcataaaaagatgagcaaaagcgaagcctttgaagaatccattcggatgctggatgcagtaaaaatgccggaagcccgtaaacggatgcggatgtatccccatgagttttctggcgggatgcgtcagcgagtcatgattgctatggcgttgctgtgccgtcctaagttattgattgctgatgagccgactactgctctggacgttaccgtacaggcgcagattatgacgctgctgaatgagctgaaaaacgaattcaataccgcgattatcatgattacccatgatttgggcgtagtggccggtatctgtaataaagtattggtgatgtatgctggccgaaccatggaatacggcaaagcccgcgacgtgttttatcatccaagtcacccatattccattggtttactgaatgcggttccgcgtctggacgctgaaggcgaatcgctgatgaccatccccggcaatccgccgaacctgctgcgtttaccgaaaggctgcccgttccagcctcgctgtcagtacgccatggaccgttgctcaaccgcaccggaattggagcattttggtgaagggcgcttacgcgcttgctttaagccagtgggggaattggtatgaatacagtgacagataagcgcgttttgctcgaggtcgccgatctgaaagtgcacttcgacattcaggatggcaaacagtggttctggcaaccgtcgaaaaccctgaaagcggtggacggcgtgacgctgcgtttatacgaaggggaaacccttggtgtagtgggcgaatccggttgcggtaaatcgaccttcgctcgcgccattatcggtttggttaaagcgaccggtggcagcgttgcctggttagggaaagatttgctgaatatgagcgacgccgagtggcgtactacgcgcagcgatattcagatgattttccaagacccgctagcgtcattgaatccgcgaatgactatcggcgaaattattgccgaacctttacgcacctattaccctaaaatgccacgtcaggaagtgcgggataaagtgaaggccatgatgttgaaagtgggcctgttacctaacctaatcaaccgttatccgcatgagttctctggcggtcagtgtcaacgcatcggtattgccagggcgctgattctggagccgaaactggttatttgtgacgaaccggtatcggctctggacgtatcgattcaggcgcaggtggttaacctgttgcagcagttacagcgtgagatggggctgtcgttgatctttattgctcacgatttggcggtggtaaaacacatttccgatcgcgtattggtgatgtatctcggccacgcggttgaactgggtacctacgatgaggtgtaccacaatccgcagcatccctatactaaagcgctaatgtcggcagtacctattcccgatccggataaagaacgggacaaagtgatccaactattggaaggggagcttccttcgccgatcaacccgccttccggctgtgtgttccgtacccgctgcccgattgccgggccggaatgtgctaaaactcggccgttgctggaaggcagcttccgtcatgcggtttcctgcctgaaagttgatccactgtaatcattccggcggaatatcattgagaaaaaaaagccctgttagttcaattgctaacagggcttttctataggtaaggtagttcattagcctgagactaaatgagtgcctgacttactctttccacagaatatggcagagtttatggtctttttctcggcacaacagaacgcgggcaaagacgtcattaaccggttcgccttcgctctcggccagaccgatgaccacttccgcgaaaaaatctggattcaggtcaaaatcgacgtgctcactccagtcttcggcgggatcgaaaagctcagccgcaccgcgttcctcaaactgcaaattgaatagcagaatatctgccggatccagattgtcgcctgccagctcaagaaaaatatcgtaagcctgttccagcgtttcgtcttcgctcaggcggttgttgaggtccataatcgtctggtccatgtgcaggttcccattagtcatcgcaatattgcccacattaaaacattctctttgcgccttttacacactttatagcgcttattgccaataactaagaatttctacaatacgataatcattactaagcaacattattacaggaatggactgaagaaatagaacagacgctccatcacccgatgccagagtggccgtttggcccaaacttcaccgtccaacaacgttgagcgagcgatataatcgtcctgaacctgagacaaatcattaccgaaaccggcatcatcgatcaccaacgtgatctcaaaattaagccacaggctgcgcatatccagattgaccgtaccgaccagacttagctgtccatcgaccaaaacgctcttgctgtgtagcaaaccgccttcaaactgatgaattttaacgccagcctccagcaattcggcgaagaatgcgcggctggcccagcggaccatcatggaatcgttgtctttcggaacgataacactgacgtctacgccgcgctgcgccgcggtgcaaatagcgtggagcaaatcgtcgcttggcacgaagtagggggtggtcatcaccaattgttcacgggcggcataaaccgcggtcagtagcgcctgatgaatcatttcttccgggaatccagggccggaagcaataacctgaatggtatggccggactcctgttcaaacggcatgatattggcatcgggcggcgggggtaaaatacgttttccggtttcgatttcccaatcacaggcataaactatgcccatagttgttgctaccgggccttccattcgcgccatcatatcgatccattgacccacacctgcatcctgtttaaagaaacgcggatcaaccatattcatactgccggtataagcgacaaagttatcaatcagcaccaccttacgatgttgacgtaaatccattcggcgcaagaatacgcggaacaaattcactttcagtgcttcaaccacttcaattccggcgttgcgcatcatagcgggataagggctgcggaagaaggtcacgcttccggcagaatccagcataacgcggcaatgcacgccccgacgagcggcggccattaaggattcagccacctgatccaccagtccgccgggttgccagatatagaaaaccatttcaatattatgttgagccagatcgatatcgcggatcagcgctttcagcgtgtcatcggtggtggtcaacaactgaagttggttgcctttaacgccgctaatgccttgacgacgttcgcaaagttggaatagcggcgcggctacctcgctgttttcggtggcaaagatatgctggcattcttttaattcacttagccaatgagcggtggaaggccacatggccttggcgcgttcggctcgtcgtttaccgagatgcagctccccaaacgataggtaggcgataatcccgaccaacggcagaatatagatgataagcaaccaggccatggaggaaggtactgcgcgtcgcttcatcaggatacgtagcgtaaccccggcaataagcagccagtagccgaagaaggagagccaactgattacggtataaaatgttgtcataaaagcgagaagtcctgttcgcaaacgttcatcactgagtgtacgcacagtaatgaaaaggggaaaccattaactcgatatattcaactataaattctttcagttaaaaggacttgcgtccatttgtgttcttataatcttagcgggtttctcgtcaagcgtgaataaacctgcgatggaataagataactacgaattcctatttcctgcggacaagtacttggcggctgagccgaaaggtctataatgagccggttctcagctttggaagaatagtttcatgagacgtagtaaaaatgaagttggccgttggcggatgcttcggcaaaatcaacgtcggcgtaatcgctggttggaagggcagtctcgtcgttatcgtcatatatatagcgtgcgccagattcacgtaaatcagcatcgccgggcgttgttgtttagcgtggcttatgagtggcagtaaatgacgagaataataagaacggtccctttgtggggctgtttttatcttgttttaatatatcttacaaatagactctgagtattttggcttcattttttttgcgcggaatctaaccagatgaagtgggtataacaatatttttccgatatttcttgaacggatttcacttctgagcaaagtcgcgttaatatatatacatggtcgctttgtgactagaggtcagtttcaggggtgttactgagcgatagcataaagcggccgacctttcggcgtaatatttagccatttattcaagtgttctttctttattaattctcgaattatttcctgtatcatgctgttttttatggatttaatatccaatgatgacggattcaattgcggttttatatcaatgaatgctatctgaaatattttagaattcactattcctttgtgcaagattaatctgaaggtttaatgaaatgtcaatgtccatatcagcctaaaaataaatattgctactcttttcttgtgccacggacaataaatcagacaattaacttttagcctaatctgctggcaatcgtcttcaatgcgtagccaaaaataacgttatcctagctattgttatatgttttcacctgttctattgagggcgatcaaagatgaatcaaccgcttatagtcttagacccaaaccgtgtaaagggttctacagataagtccagtttaaaatcaggtgttaattaaataaaacagaaccggtactagaacgattgaccgaaatctcgttttcatgcgtggaacgataataataaaaattagtgaagatacgactattgatctgaagccggatccggataaaccctcgacgcaactttaaaaattgagttatttcaaagccgttactgcggttatgccgtgatcatcacagatgtaattatcaaatcggtggagactggctcttccatttcagcagagagtgtattttctatgtctcgatatattttggctaaaacggttttctttggaaatttgcaaaagagtgacgcgctttacaagtatgagatttacagcgatcgggctgaaactgtgttccaaaccactatttatgctgaacagactatgactcaggggaaacacagttatagtttgtgggtacggaaagatcatcgcattttgaaggctgcgcctcacgatcttgaacaggccgtcgatgcgtgcgaggaacattgggaaaaaacctacgcgaaccttaaataatcgctgacattttgttttcacaaaaacactgttattggcagacattgtgggcagctgccaataacgccggtttgagtggaaacaacatccaaggatatcaatgcaattaccgattaaaaccttaagacttctgctacgacgctttactccagatgatttcccttcttatcaggcctatcactcactggcgtcggtttatcgttatctctattgcgctccggcggatgatgccactcttcgggcaaatttactgcaggccactgaatgccgttttcaggaacagggagataccttaaccttggccgttgaacgtgtggacaccggcgagcatattggcgaagtattgtttaaactgtctaataaaccggcagctcaggctgaggttggttatatatttaatccaaagtttagcgggcagggctttgccactgaagcggttcaggccatgttgaatatcggctttacccaacatggatgccatcgtattttcgctcggttggatgcattgaatatcggctcgataaatgtggtcgagcgtttgggaatgcgcaaagaagcgcatctgatacaaaacgactgttttaacggcgtatggggcgatgaacttatttatgcgcagctcaaacgtgagtggctggctaattctgcccgtcaggattaggggaaagatatgcaggccgtgttcgctagatccttaccaactgtgtcggtgcaataataaaggaggctcgaatgttagataattactttggctctgggaatctcccaagcgatcagcaaaaacaacggctattggcggtacaggctgccttagaaattattaaacaatcggttggtgccagcgaaggggctgcttattcgcgcgttaatgacgatatgaagcacgctgtcgagtggctagcgccactggccgatgccattcaacaagccttgattgtgaagaaatagttttattctagggtcttatcagaacagcggttatcgatgagacccggattagtatgaggggtataacgccaggactcacgtaaacgggctacaatgctctattcttcgtacggttaatcagcaatacatgaataatatttaattaggattttattgcgcgctttatttaagtaagaaaaagttaattaaattggtctaatgaattcacggagagtaagactaaaacagttaatttcccacatatattatatgggcgaaagaaatgactttttaaagcagctgcagtcaataggccacacagttaatctgtcgatttaatccgccggtaaattcaaatactcatcagaatacttgtttaaaaggttttacaatcaccgattgataaacgccggccgccacatagggatcttgttctgcccaagcttgagcttcggccagactttcaaattccgcaataaccgttgaaccgctgaaacccgcggcgcctgggtcatggctgtcgatagcaggatgagggcctgcggttaataaccgcccctgatcccgtagggtttgcaaacgcgctaaatgggcagggcgaacggacaaacgctgtgccagagaatcgggtacatcggttgagaaaattaaataaagcatcgtatcaccttaaaaatcagaccgataaatgagtaataatcgaatattcatctgaccatgttcagtgattaaattcaacccgcgaacataattttggttatttgtttttactcaaccgataatggcaggttatcagtgctgaaataaaatgataattaactgtcaacagaaagttttatcattctgagatcgcagctaaaaacatcatttagtgccgattgaagcaattgtttgccattgcttattgaatatgattgctatttgcatttaaacttggcggcatcagaggatattgaatcactatgcagctaaaaaaacttttaccggttcgtcggcttacatggccagtagcattttctctcgggttgcacggcagcgttattgctgcattgctttatgtctccgtcgaggaaataaataaacaacctgaaattgaagatgcgccgattgcagtgacgatggttaatatcgccacatttgctgctccgcagcctgcggctgccgaaccggaaagtcagccggagcccgtagttgaggaaaccccgccagaacctgaagttttgccagaaccggtaccggttcctttgcctaaacctgagccagtgaaaaaggaagtggttaagccgaaacccaagcctaaaccggtgaagaaagaagtgaaaaaaccggacgtgaagaaaatcgagcagccgccaacggaatcgctgtttaaatccgatgaaccgaccgcggtgacccaagcggcgccggtgaaatctgcaccgccagcctcggtgcctggctcgtctaacactgctggtcctaaagcgctgagtaaggcaaaaccaacttatccggcgcgcgcactggcgttaggcgtggaaggttcggttaaagtgcaatatgacattgatgaaaatggccgcgtgaccaacgtgcgtatattagaagccacaccgcgtaatacttttgaacgggaagttaaacaggtgatgagaaaatggcgatttgaggccgtagcggcaaaaaattatgttaccaccattgtgttcaagattggcggtgatatggaaatgaactgattgggttatttcccataagttcgtccggttatacgtttttgcagtgtctatgtcagtatctatgtcgccttaaaaagggtcgctttggcgaccctttttaagggtagaaactgaagctaaaaagcagcgggaaatgattactgcccggagccaacttcaaaattaatctttcccgcgggcagtgggcgagatttgccttcatcatcgaccgccacgtaagtaaataccgcttcggtagcgcgataacgctgaccaataggttctgatgaaactttcttaacccacacttcgacattcactacgatggaactgcggccagttttaatgcaacgagcgtagcagcaaactacgtcgcctacggccaccggcttgaggaaggtcatgccgtccactcgtaccgtcaccactcgaccgtgagctatttcctttgcctgaatagcgccaccaatatccatttgcgacatcagccagccgccaaaaatgtcgccgttcgcgttggtgtcggctggcattgccaaggtacgaagtaccaattccccgttgggtaaaagttgctgagtcatctctgtcttcttataaaaagtaaattcatacaataatggctcgcccagaacggcgggcgagcatcaaatcaatcttaggattttttttgttctgttggcatatggcgataaatatacacgccgcttatcagggtaaagaccagcgttaatgcggttaaaccgaatactttgaagtttacccagatatcctgcggcaaccagaaagcgacatagatattagccagaccgcagaccaggaaaaacatcgcccaggccagattgagtcgcgaccatacgctatcaggcagggttaactctttgcccagcatgcgctgaatcaagggtttcttcaggattaactggctgatcagcaaggcaccggcgaacagaacgtaaattaccgtgactttccatttaataaactgatcgctatggaaggccaaagtcagtgaaccaaataccacaaccatggcggcggtgaccaaggtcattttctcgaccttgcggtacatcacccaacttatagccaaagccaacagcgttgcgacgatgagtgcgcccgaggcgacgaaaatgtcgtacatcttataaaaaataaagaagacgaccagcggtaggaaatctaaaagttgcttcattaatcaatccattttctgtacatcaagtgactataccggattcagcgatgtgagggtacagtgggcaaaccgttattatccctaattatcagccggaatgcgcgggctgccagcgttatttgcagaaacttacgattaacttatctggtagttgccagttgtcgtagaactcagcatgatggactgagactattggtttagaggtagagaagaacagatgctgaggaaatcgctccgttattggatgccgggattaaccctgttaatggcctaccagcgcgaatggctaaaaccggatattcgtgcgggtttgtcggtggctgcggtggcgttgcctattgccatcgcttatgccgagttaaccggcgtgagcgcggcggtggggctatattcctgtatcttaccgatgattgcctacgcctttttcggctcttccaggcagttaattgtcgggccggatgcggcaacctgtgcggtgatcgcggcagtcgtagcgccgttggcggcgggaaacaaagaggttcattggcagttaaccataatgatgacgctgatgatggggagctggtgtctggtggctagccggttcaagctgggcgcgctggcggatttgctgtcgcgaccgattctgaccggtttgttaaacggcgtggcaattaccattattgtcgatcagttgggcaaagtgtttggttttatgacccggccgccacagctgatagagcgggtgctggcgctgccgcacaatattctcaacagtcatttacctacgctggcgatttctatcctgactttcgccattctattcggcgtgaaatgggcgcgccccaactggcctgcgccgctgctggctatcgtaatcgcgacttttgttacctgggccggcggcttacagcagtttggcgtggaagcggtgggcggatttaacggcggtttgccgatagttagctggccggaattcaagccgggcttgctgcgcgatatggtgattccggcgcttaacctcgcggtagtcagctttgtgagtatgatgctgacggcgcgcagctttgctaccaaaaacggttacgaggtcgatgcagatgttgaactacgcgctttgggcgtgactaacatcgtttcggcgctgtcgcagggctttgccatcagcggagccagcacccgtaccgcagttaacgatgccaaccacggtaagagccaattggtgtcgattattgccgcgctagctattgcgttggtgctatttttcctcaccgcgccgttgcagtttatcccagtagctgcgctgggcgtggtgttgatctacgcggcttggtcactactgagtttcaaaggcatctggcaactgcgaaaaagaaatacgcaggcgttcagtctggcgatttttacctttggcagcgtagtgctggtgggcgtcatcggcgggattgggttggcggtattactggggttactgcagtttttacgtaccgttttccgcccgacggagcaactgttgggggtgaattcagaaggcatgattcactcgatgggtaacaataacggtattaaagcggtgccgggggtaatgatttaccgtttcaactcgccgttaacctatttcaacgtagcttactttaagcgccgcatccttaacttggtggactcaacgccacatcaggcagactgggtggtgatcgacgcggttgccagtttcacctacgccgatatcagcgtgctggcggctattgatgagctaaaacgagacttaaaacagcgcaatgtcaaattggtattggcggggcgtcgcactgagttaacgcgttggttccgcctgaatcgcttaaaaagtcaggataacgatctgattttagtaccggatttgtatctggcactcaagctgattcaaagtaaaaaacgggttgaggaacgaaccgaagcggagcaactggaaggatcgtcctaaattagttgccgagcacaaagtgacgcggtcgagggctgaccaccatgtttcttccgcctcgatttggcggtttcttttgttggtcataacattggcagtaaaaaagggcctgagcggcccttttaggtttctatatgatgacgttatgctttacgcaacaacatatataagcggaacagataaaccagcagcagtgccgagaccagattgctcagggtgctcagtaccacggtggcaatggcaggtggcagcgcggcaaggtggccggccagatagagcaaaatcagcttggctgccagccacaacattaacgccggaatcaccaaacgcacgttagcaaaggccagtttggcactggctttcattgccgcaaatacgccgattttttcgttggcgaccatcaccggagccagacataccgcgaccgcaatcaccacgcccggcacaataaacagcgccaaacccagttgaatcagtagggtacagataaacaacaataacagcagacgcggcagaatcggcaaggaaagccccaccgcctgcaatgcgctgattcggctgccctgtgagacggcagaaattagcgtcagcattccaccaaccagcagtagattaccgatcagtgcggagaaggtcgccaccgcagagactttgagcaacaccatttgctgttctggcgtcatttgcgacaccatttcgcgaattcccatggtgcttgaagaagcgatatccgtatcaccagcattcaaaatcaacaattggtctgcatcaggaataaacgcctgattcagcatgacggtaataaacgcagtcaataacgccaataacagaatggcggcgagctgattgcgaaagaaattaaaactgtcacggtacagagtgttcgccgtgataggcatgaaggctccttgggataatcgataaaaataactttcagggaaggattataccctgttatgcgcgttctgtgaccctgtgatcaacaggctacctatttcctcggcggccaattgctcaaattcttcaacaggtaacggcggtaagccgtaataggctctggctcgatcgcaggattcattgcgttggttattttcaccagaataggaaaattcatggcagggagtgggtcgatccggataaatgctacaggcgacctgttggccgatgtcaccctctagggcgacgcagcgcggcgatttgcagttagtaccgctcatgcagctaataaaaggggtgatttgctcagtcaggtcattgggcactgagccttgttcgctgcccgcttcggaccaatagaaggaaacacgaaaataggcgcagcacgcgccacagctaatgcaagggttgataacagcgctcatcttgaactcattcgctcctgtataaataaaaaatataggacagccaaccgatcacgaattcacacaactgataacgcctgacagcattacctacctccccctgaggaatcaatggttatttaaccaacagcaataaatgaaccattcacccctttcttgattcagatcaattccaacgtttttaaggaattaaataaccttacgcaaaatgttattttttaaaacgacgttaaaagttgtgatccggattggatcataactacgcatttataggtatattctgcctcactataaaccatacaaatggaatggataatgaaaaaggtatgtttgttattactggctgcggcaactctggctccgtctttggcatcggctcatcaggaaggtgattacatattccgtgcgggtacggcaacggtacgaccaaatgccggttcagatgacgtattgggacaaggttctttcagcgctgacaacaatacccaactgggcctgactttcagttatctggttacggacaacatcggggtggaattactggctgcgacgcctttccgccataaaattggtttgggcgcgatgggcaatatcgctgaagtcaaacaattgccgccaaccttgatggcgcaatattactttggcgacaaacaggacaaactgcgtccttatttaggcgtaggtctgaactacaccactttctttgatcaaaaattcaataataccggcagcgaagcaggcctgacggatttgagcgtgaaagattcctggggtatcgccgggcaggcaggtttggattatatggtcagcgaaaactggatgctgaacatgtccgtttggtggatgaatattgaaactgacgtgaaattcaaagcggcggggcaagagcacactatcaatacccgtctggatccttgggtattcatgtttggcgcgggttaccgcttctaatttatctgagcgatatggcacaaaacagaggaggcgcattgagcgcctcctttttcttatatgacttataatgattgactaagacgcgtattaattatcgaattctcatatcgtttgctacagatttgacaccgggtacggtgcgggtaatctgtacggcgcgatcagcttgctggctggagctgacaaaaccgctcaactgtacccggcctttaaaggtctcaacgctaatttcagtcgattttaggttcttctcacccagtaacgcggtttttactttcgtggtaatcactgtgtcatcgacataacccccggtgccttcggttttggccgtcggagcacaggcggatacggctaacgccattacggcggcaatacataaggctgaaagggttttaaatagcttcataagttactctccatgtcctgccaatgttaaaagaacgttcactacaaagttaatagctgaaactttaatcgtgttaaagcggtcattgtgttgagaagaaaataatgttgaaccaaaaataacgacacattcagtaccatcagcgacgccgaagtgattcggaatagggcaattgatcgttcgcatgtgcagttaagtattgattatgaatagtgattgagcaaattagtacgggcaatttggtgtggaaagagactcattaaacctaaataatgcccgatctgacggatcgggcatgccgtattaacggcgagtggcggccttcattttactgacaaatcgagatagctgcgccagcatttctgccggttgcactaaattgttttcgataattttcacgatggccgaaccggaaatggcacccgcggcaccggcatccagcgaggcttttacctgttcaggatcggaaattccgaatccttgcagcgccggagccgcatgatattcatgcagtttatccaccaaatgattgagcggttgctgcgcccgattttctgcgccggtgacgcccgcgcgggaaagtaggtaagtgtagccgcggccgtgggaagaaatctcccgcagcaggtcatcgctggcgttaggcgggcagatgaagatcggcgcgataccgtggcgcagagcggcggcgcggaaaggggcggactcttcaaaaggcacatcggcgattaataccgaatccacgccgacttctgcgcagcgttgatagaagttatctatgcctttgttgaagaccagattggcatacatcagcaggccaataggaatattcgggtgttttttgcgaatttccgccagcatttcaaaacactgggttggggtgactccggcggcaaaggctcgcagggccgcattttgaatcgttgggccatcggccaaaggatcggaaaaaggaatgcctaattcaagagcatcggcaccggcggcaatcaatgtatcaatgatcgccaatgattgggttggcgatggatcgcccagttgcacaaagggaacgaatgcgccttctttacgtgcatccagttgtttgaaaagttgctgatagcgttccatcaaatttctccccgtgctttcaaaatatcgtgaacggtgaaaatgtctttatcaccgcggccagagagattcacgaccagaatctgttttttctctggcgcggcgttaatcattttcagggcgtaggccaatgcgtgggaggattccaacgccgggataatcccttctttacgagagagagccttaaaggcttccagcgcttcatcgtcagtgacggaaacgtattccgcgcggccaatgctgttgagataagcgtgctgaggcccgacggaagggaagtccagaccggcagagatagagtaagattcttcgatctgaccttcggaagtctgcatcatcggtgatttcataccgaagtagatgccaacgcgaccatgttttaacggcgcgccgtgctgaccgctttcgataccgtgaccggcgggttcaacgccgatcagaccaacgttttcttcatcgataaaatcggcaaacataccgatggcgttggaaccgccgccgatgcaggcgagaacggcgtcgggcagacggccttcgcgcgccagaatctgcgctttggtttcttcgccaatcatgcgctggaattcccggacgatagtcgggtaagggtgcgggcctgcggcggtgcccagcatatagtgagccttttcgtagctgccagaccaatcgcgcaacgcctcgttgcaggcgtcttttagagtagaggagccgctgtgtactggaatcacttccgcacccatcaggcgcatacggaagacgttcggtgactgacgctcaatatctttggcgcccatataaatgcggcatttcaggcccaacagggcgcaggccagcgccgacgctacgccgtgttgaccggcaccggtttcggcgatgatttcagttttgcccatgcgtttggccagcaaggcttgccccaatacctgattggttttatgcgcaccgccgtgcagcaggtcttcgcgcttcaaatacagcttggtattggtgccttcggtgagattctggcacagggtcagggccgttgggcgaccggcgtaattttttaacaaatcatggaattgcgcctgaaactcaggatccaactgggcgctgacaaaagcctcttccagttgtaccaatgctggcatcagaatctgcggcacatacataccgccgaattcaccaaagtaggggttaagtctggtcattatcctgtccgttattcgtaggtttatcgggttcacccatagcaaagctattttaataagcgcgtaaggtctggaacgcagcggcaatcttgttcggatctttgattccggctgcgccagccacttctacgccggagttaaaatccagcccggcacagccaagcgtagcggcaatggcgcagttttcggcattcaggccgcctgccagcagcacgttatccaacggctgttgattcaaaactgaccagtcaaaacgttggccgctgccgcccgcgccgttgtctagcacatagcgatccacagaggggatatcgcgggcgggcagggaattaccgacgctaaccgctttccaaatctggcagcttgccggtaacaattctcgcagtttctgaatatagtcccgatcttcgttaccgtgtaactgaatcgccgctaatgccagcgcttcgacactttgctgcacggtttccagcttggcgtcgcggaatacgccgacatatttcagcggcgcggcgctgatgacggcgcgggcctgtgccatatcgatatagcgaggggaactgccgacgaaaatcaatccgccgtacactgcgccagcgctataggcggctgcagcgtcctgcggacgagtaaggccgcaaaccttgttttccccgagcaacacccgacgcactgcggcattcaggtttggttctgacatcaaagcgctgccgatcaggaaaccgttagcaaattggctcagttcccgcacttgttgataggtattgataccggattcgctgattaccgtgacgccggctggcagacgtggagccagctgtttggtgcgattcaggtcgatagacaggtcgcgcaggtcgcggttgttgatacccaccactttggctcccagtttaattgctcgctccagctcttcttcattactggcttcggtcagtacgcccatattcaggctgtgagcgacggcggctagctcccgatagcgtttgtcgtccaataccgatagcatcagcaatacggcatcggcttgataaaaacgcgccagaagaatttgatattcttcgataataaaatctttgcacagcaccggctgagtgaccgcagcgctgaccagaggcagaaaatcaaagctgccttgaaaatatttttcatcggtcagcactgaaatggccgaagcatagttggcgtaaaccccggcgatctccgccggatcgaaattctcgcgaataacccctttggagggggacgcttttttgcattccaggataaaaacggtgttatccccttgcaatgcctgatagaaactgcgctgacttggcgtcaccagatgttggaaactggacagcggctgatgtagcttgcgtgcggcgacccagatttctttgtcgcgaacaattttgtgaagtatcgtttcttgcatgatctatcctctcgctgccagtgcgataactcgctcaaaagctttgccgctatgaattatttccatagcctgatgtgcgttttgacgtaaattctcctgcccgtttaatttcagcaacagcgccacgttagccgctaccgccgccgcgtgggcaggttcgcctttaccttgtaacaacctcgccagaatgtcacgattttcttccggtgagccgccctgtaaggacgccatcggataggttgataaaccaaagtctttcggcgtcagttgataggtttggatcttaccgtttttcagttccgctacctgagtgggtgcgtggatagccacttcatccattcctccaccgtgaaccactgccgcacgttggtaacccagcactcgcagtgtttcggcaatcggcaacaccaattccgggctgtataccccgattaacgccagcggtgggcgcgccggatttatcaacgggcccagcacgttaaacagggtgcgggttttcagctgttggcgtaccggcatcgcgtggcgaaaaccggtgtgatactgcggtgcgaacaggaaacaaatccctaattcatccagcgcctgacgagattgctcggcggtcaaatccaaacgaatgccgaaggctgccagcaaatctgaagatccagaacggctagacacgctgcggttgccgtgtttggctactttcatcccgcagctagcagccacaaaggcgctggccgtggagatattaatgctgttagtgccgtcgccgcctgtgccgacgatatcggcaaaggcgtaatccgggcgagggaatggctgcgcgtcggccaagagcgcctgtgctgccccggcgatctctgccggcgtttccccccgaactttcatactgattaaagtcgccgccagttggctaggctccagctcgcctcgcacgatggcggtaaataattgctggctttcctgctgagtcagtggctcggcgcggaacagtttttcaaataaattatgcatgatgagttcctgaaaagttacgccaaagcccaggccagagtttgctcgagtaaacgagcgccctgagtggtcaaaatggattccggatggaactggtagccgcaaacccggtgagcatcgtgacgaaccgccattaccatttggttaaaatgcgcgttaaccgtcagttcggcgggaatattgctgccgaccagcgagtggtagcgggcgaccggcagtggattcggcataccggcgaacataccttgttcatcgtgctcaatcgtcgaggctttaccgtgcaggatttctcccgcctgacctacgtagccgccgtaggcttccacaatggcctgatgtcccaaacaaatcccgataatgggaagttgaccgcgtaggcgctgcaataattccggcatacaacctgcttgcgctggcgtaccggggccgggtgacagcaccagcaccggctgagacatctgttgcaagcgctcggtaatggtgtcggcggcgatctggttgcggtaaatcaccactttatgaccgctggcgcgtagctgatccaccaggttgtaggtaaaggagtcaatgttgtcgagcagtaaaatatcggccattagaaaatctcctttgcctgatgagcggtcgcgatagcgcgcaataccgctcgcgctttgttacgggtttcatcggcttcggcctgcgggatggaatccagaacgacacctgcaccggcctgtaccgtcgctacgccgtcttcgacataagccgagcgaataacaatgcaggtatccaaatcaccgtgcgcggtcaagtaaccgactgctccgccatagctgccgcgtcgtgtgccttcgctttgagcaataagctgcatggcgcgaactttgggggcgccgcttaaggtgcccatattcatacaggcctgataagcatggagaacgtccaaatcgtgtcgtagcgcgccgacaacgcgggaaaccagatgcatcacgaaggaatagcggtctactttggttaaatccgctacgtaacggctgcctggctcgcaaattcgcgccaaatcgttgcgtgccaaatccaccagcatcagatgctccgccagctctttatggtcggtacgcatttccagctcgatgcggctgtccagatctcggtccagctcgccgttggctcgacgcccgcgcgggcgggttccagcaatggggtaaatttcgatctggcgattgtccgcgtcgtatttcaaggcgctttctggcgatgcgccgaacagagtaaattcgttgtcctgcataaagaacatgtaagggctgggattgctgtcttttagcgtttgataggcagccagcggcgacggacaaggcagggagaagcggcgcgaaggcaccacctggaaaatttctccggcgcgaatcgcctgctgcaagccgctgactacctgacagtattcctcgtcggactgattgcagttcagtgccatttccggcacggacaccgctggaatcggctgcggaacctgctgcatttgttgcaccaattgcttcaggcgttgctgtaaacggtattgttcctctgtatctggcgtgaacagactggcttgtaaacgggcggtgcggttctggtgatccagtaccagcaaagtttctgccagatagaaacaaaaatccgggcagcgttgctcctgacgcagtggcggcaggtcttcaaatccggcgaccaaatcgtaggcaaacagaccgcctaacagcatggcttcgcgttcgtcggccggtgtttctaccagcgttaataactggcgcaacgcgtcaaacactgacagcgcctgtaggcgggaatcttcgtcctgcatatcgttgatcggcgggaaggtgagctcgcggccgataggacgctcttcgatttttacttgctcgggcaatgctgcatccagcagtggcagcagcgccgcgccgttgcgactcagtgcctgaatgctgacctgacgacctaacgcggtgatgcgcagcgcactatcaactaccagcaagcttttcagattttgcttgctggttatctcggcggattccagcagcaacgttgccgggcgagcgccacacagctggtggaaaagggcggttgggtcgtccctataacaggcttcagccgtgagtagttttaatgtggggcgtactgtttgcattgatttaaccctgattctgtccataaaaaagcccgcgaatgagcgggctgaagcaatctgcatggtctgatgactgatatgcgtgattacaccgcccgaaaaagggagctatgccaccaacgaagtagagaagtcatatagttgttcatcatcagtctctttatgattgcattcagtttatggggctggatcagcttaccgctgtcctcaactagcgtttttttcgctactttacttcaacttattaccgttctggctgaccgctttgtaccgagaatactcttcgatggtactttgctattactcaaccgaattattcgctctgccagtgaactcgtgtactagtaaactagttctaggggttgctgtcaacccctcgatcttgttttttaacgcgctttttcatccacccgcatcgcctttgtcaagattggttaacatctgcagcgggttagcggttatgataggccgcccagactgattcggatcctagctttgactgacaccacaattgaaccgaccgcttttaccctgtatgacctccatagccataccactgcctccgatgggttattaacgccctcgcaattggtggcgcgtgcggcatcaatgcgcgtgggggtattggccataaccgaccatgacaccaccgccggactggccgaggcggcgcaggctatagatgagcaagggttagcgctacggttgattaacggggtggaaatctcaacgctgtgggaaaatcatgaaattcatattgttgggctgaatatcgatatcagccatccagcgatttgcggtttgctgcaacagcagtcagatcatcgccatcagcgagcgatggaaatcagcgcccgtctggagaaagcacgtattcctgatgcttgggcaggggcgaaccgactggccagcggcgggcaggtgacgcgcggccattttgctcgttatctggtggaactgggattcgcgtcgaacgtcggccaggtatttaaaaaatttctggcgaaaggcaagaccggttatgtcccggcgcagtggtgtacaatagaacaagcggttgaagccattcatcagtctggcggacaggcggtaatggcgcaccctggccgttatgatctttccaccaaatggttgaaacggttgttggcttatttcgccgagcaaggcggagacgcaatggaagtcgctcagtgccagcaggcaccgcacgagcgagcccagttggcgcagtatgcgcgtgactatcatttacttgcatcccaggggtctgattttcatcagccttgttcctggattgagctgggccgcaaactgtggctgcccgctggggtggaaccggtgtggcgtgattggcccgtagaagccagccataccgaagacacgttgaacgatgaggtagagttatgagtcaatttttttatattcacccggataacccacagccgcgtttaattaatcagagcgtagacgtgttacgcaaaggcggtgtgattgtttatccaacggattctggctacgcgctgggctgtcgtctggaagaaaaagcggcgatggagcgtatttgtcggattcgtcagctcgatggtaaccataacttcactctggtttgccgcgatctctcggaattgtctacctacgcctacgtagataacaccgctttccgtttgatcaaaaacaatacaccgggtaactatacctttattttaaaagcgaccaaggaagtgcctcggcgcctgatgaatgacaaacgtaaaacgataggactgcgcgtgccgtctaaccctattgcgttggcgctgctggacgtattgggtgagccgctgatgtccacgacgcttatgctgccggggaatgattttgccgaatccgatccggaagagattcgcgatcatttaggtaaacaggttgatttggtgattcacggtggatcccttggccagcagccaaccacggttgtcgatctgaccgaatctgcgccggaagtgattcgtgaaggggctggcgacgcccgacctttccgataattttcctgaaacggtcatatttatcgggtttggcgtttgtccagacccgataatgtctcatattttttccctaaactggccgtcttctggccaccaaacgtcgctacttttctcattccgcctctatcctgagcaaatgctcacgcagaaaaggcgttattttgcccattgctgtggtggctgatgccggcagagacgaatgtgctctgcaacggtgagatttattagaatcattgggcagaaaattagtgtaaaataaccgaccacggactggcttgtgtggctgcctatagggcggatttatcgacatgcttagttctaaaatgtattccaatcagttggttagactcatttcggggtaagcgattgataaaaatatataacacgacgcctgtgaaggcgacattagaggttgctcaatgagcgagaagttacagaaagttctggcgcgtgccggtcatggttcacgccgtgaaattgaagggatcatccaacagggccgcgtcagcgttgacggcaaagtggcaaagttgggcgatcgcgttgaagtggctcagtccaccaaaattcgcctggatggccgcgttctatcgatcactgaatcggaagaagcggtatgccgggttttagcctattacaaaccggaaggcgagctgtgtacccgcagcgatcccgatggccgtccaacggtgttcgatcgtttacctaaactgcgcggttcccgttgggtcgccgtaggtcgtttggacgttaacacctcaggtttactgttgttcaccaccgatggcgagctggcaaaccgcctgatgcacccaagccgcgaagttgaacgtgaatatgccgtacgtgtctttggccagattgatgatgaaaaaatcaaacaactgagccgcggcgtacagttagaagacggcccggccgcattccgcaccatcagtttccagggtggggaaggtttgaaccagtggtacaacgtgactctgaccgaagggcgtaaccgcgaagttcgccgtctgtgggaagccgttggcgtacaggtcagccgcctgattcgcgtgcgttacggtgatatcaatctgcctaaaggtttaccgcgtggcggttggaccgagctggatttgaaagccaccaactacctgcgtgagctggttgaattggatgttgaaaccgttagcaagctgccggtggaaaaagatcgtcgccgtgtgaaagctaaccagattcgtcgggcggtaaaacgtcacactgaagtggcaggtcgtcagcagactgccggtcgtcaaggttcagcccgtaaaggctcaactcgtcagaacgcgggtaataccccctctgcgagcactccggtttcaggtcgccgcggcgcgcccgctaaacgcggatcaaaatagcggttaaccttattgccgcagtctctgtactgcggcaaattttcttcctcattcatctcttcaatattactgcctgattattcccattgcttttccaattatcatattcatacagaatcatatttataaaatgaatgtagtgttaccaatcgattccttgctgggccttaattccggcgtcaaaagcatgtttaaccggacgtaactcgcttacggtatccgccagttccagcaaatcgcgatgacagcctcgtccggtgatgatgaccgtttgatgagcagggcgatgattcaaagcttgaataacctcttccggcgttaaatagccgtagctgaccatataggtcagttcatccagcaccaccaaatccagcgaggcgtctgccagcatccgtaatccatgttgccaaacttcctgacaggcagcggtatcagtggctttattctgggtatcccaggtaaaaccggtggccataacctgaaattcgacgccgtgaggctctagcagattgcgttcgccattcggccattcgcctttaataaactgaataacacccgcacgcaggccgtggccaacggcgcgggtgacagtaccgaatgcggcggtggttttacctttgccattgccggtcatcacaatcaaaataccgcgcgtttcctgcgccgccgcgatgcgcgaatcgactttttctttcagccgctgttggcgctgttggtgacgatcgtcagacatagttgaatactttccttaaagcgactcgacggtcagattactcggcagcgccagctttgcgtcccggctgagcatcaaagctaatgccggttttgcggcggctatcatcgcccattaaatagagataaagcggcatgatttcagccggtgttttcaggttattcgggttctcttccgggaaggcagatgcgcgcattttggtgcgagtcccgcctggattgatgcaattaacccgtaagttagtagttttatactcttcggccaatacctgcatcatgccttcggtagcgaatttggaaaccgaataggctccccaaccggcgcgcccctgacggccaacgctagaactggtaaagacgagcgaaggagaagccgctttcagcaacaagggcagtaaagcctgagtaagcataaaggtcgcgttgacgttcacctgcatcacgtcttgccagatctgcacgtcttgttcggtcattggcaccacttcgcccagcaaaccggcgttgtgcaatacgccgtccaaataaggcacaacctcagcaactttctgcgcgagctgatggcaatcggcggaggtagcatgcagtaaatccagcgtcagaactctggcgggtaaaccgccggactgctcgatttgttgcttaacactttccaatttgctttcagtacggccaaccaaaatcaaacgcgcaccgtagcgagcgtaggttagcgcggcctcgcggccaatgccgtctccggcaccggttaccagaataattcggtgcgtcaaaaggtcatgtttaggttgataatgcataacaactcctctcactatcggcaggtttgcgcgatagcaggcagttaacaaagcaggataacggaagggaactcgatcgaacctaagctcaacctactgactatcttgcgcgaaaatggcgagcatcagaaaaagtcattactcctatatgcctgaaacaaaatgcattttcaatcagaaagaccctgaagatgtttttgtctgtaacaatttagaggtaatttcgtttcatttttccgctactgaataacattcattcttatatttaagagaaactaatgcaattcatcatttgcgcaagacggcgagtcaggtgttcgctagaatgcaaatactctctttcaacactgattaagaaaggcggaatgtgtggagttaatttcactgtatgggctgtttctagccaaggttatcactgttgttgtggctattggggcactggttctgctggtggtaagccttgggcaacgcaagcaaggtgcaaagggtgaattgaatctggtggatctcggcgaacagtatcgggaaacccagcgggaaatgcgtctagcgcgtatgtcatccgccgagcggaaaatctggagcaaagagtttaaaaaacagcaaaaagccgatctgaaactgaaaaaagaacgcgccaaggccggtgctattgccgcggtgaaaccttgcctgtatgtgctggatttcaaaggcagcatcgatgcgcatgaggtgacctctttgcgtgaagaaatttcggccgtgctggcggtggcgacgccgcaagacgaagtattgctgcggttagaaagccccggcggcgtggttcacggttacggtttggcgtcgtcccagttggaacgtttgcgccatgcaggcgtgcgtttgacggtggcggtcgataaagtggccgccagcggtggctacatgatggcctgtgtcgcggatcgcattatttccgcgccttttgccattattggctcgatcggcgttgttgcgcaaattcctaacttccatcgcttattgaaaaagaatgatattgatgtggaattgcataccgccggcgaatttaaacgcactctgacattatttggtgagaacaccgaacagggccgcgagaaattccgggaagacctgaacgaaactcacgagttgtttaagcagtttgtgcatcaacaacgaccttcactggatattgattcggtggcaaccggagaacattggttcggcattcaggcaaaggaaaaaggtctggttgatgccattggcaccagcgatgatttactgattgccgagatggaaaatcacgaagtgattggcgtgcgttattctcgtcgtaaacgtctgatggagcgttttaccggtagtgcggcagaaagcgtcgaccgcctgttattacgctggtggcagcgcggtgagaaaccactgctgtaagtcgattggctcactgctggcaatcagtgtcaggaataatgtcaggtaataaatagaagaaagcagggggctaatgccccctgttgttttatgacgcagggcaaaattgagatgccccaaagcggtggttaatcaaccaggtgatatttggacgacaacacgtgagccaaatgcttaaacatgttaaatacggcggtagttttcgccgtcggtaacccgtccttatccaggaagaattcgccgcgaaaaactaataccggccctttttgctctacttcagttgccaccatgccgtgcagataatcctcatgttgttggattatttcgttagcttcagtcagtaatgcctgacgttgaatcggggttgtttcaccgtacattatctttctccctctaaggtcatttctgtcgctattctactgcgggttagcgtttatccgcaaacaggctaaggtttatgcgagtgaacaaacgtttaaccttaagggattagctaaattaagattccgagttaattaggttgcgcagcggtttttatcaggtacagtgtgggattttatactactaggtggaaggttttgttgacgcaattgggctgaattaatgccctggcctctgggcgtagacaaaaatcttgagggcgtttgatacggattttaggatcgtcgggttgaggcggcgatcaaaaaacatgttgatctcctgcaaaagtaccgcaatataaaaaagagatgcagaatgccgcggtatggcgagataaaaaccttcttttagaagcaataatttaggtaaaggtaattatgggtaaagctctcgtaatagttgagtccccggcaaaagccaaaactattaataagtatttagggaatgactacgtggttaagtccagtgtcggtcacattcgtgatttgccgaccagtggttcagccagcaagaagagcgctaactcaaccgaagataaaaccaagacagaagacaaacccaaaaagaaagttaaaaaggacgaaaaggttgcgttggtaaaccgtatgggcgttgacccgtatcacggttggaaagcgcagtatgaaatcctgcccggcaaagagaaagtggttgccgagctaaaagctttagcggaaaacgccgaccacatctatctcgcaaccgaccttgaccgcgaaggagaggctattgcctggcatttgcgggaggtgattggcggtgacgataagcgttttagtcgcgtggtttttaacgaaattactaaaaatgctattcagcaagcgtttaaccaaccgggtgagttgaatatcaaccgggttaacgctcagcaggctcgccgctttatggatcgcgtggtgggctacatggtttctccactgctatggaagaaaattgctcgcggtttatccgctgggcgagtgcaatccgtagcggtacgtttggtggttgagcgcgaaaaggatattaaagcctttgttcctgaagaatactgggagctgcatgctgacctgttggccaaaggtgaaattccaattcaaatggaagtcacccatgcgcacaataaaccgttcaaaccggttaatcgcgaacaaactcatgcggcgctcaagctgcttgaaactgcgcgttataaagtactggatcgtgaagataaaccgaccagtagcaaaccgggtgcgcctttcattacgtctaccttgcagcaggcggccagtacccgtttgagctttggcgtgaagaaaaccatgatgatggcgcagcgtctgtatgaagcgggtcatatcacctatatgcgtaccgattcaaccaatttgagtcaggacgcgctgaccatggtgcgtggctatatcggcgagaatttcggcgaaaaatacctgccgtcagcggctaatcagtacagcagcaaagaaaactctcaagaggctcatgaagctatccgtccatcggatgtcaacgtgttggccgagcagttgaaagacatggaagcggatgcgcagaaactgtatcagctgatttggcgtcaatttgtcgcctgtcagatgacgccggcgaaatatgattccactacgctcacggtgcaggcgggtgattatcagttgcgtgccaaagggcgaaccctacgctttgacggttggaccaaagtcatgccggcgctgcgtaaaggcgatgaagatcgcaccttaccggtgattgaggtcggcagtgaactggatctgcaaaaactgattcctagccagcactttaccaaaccgccagcgcgttacagcgaagcttctttggttaaagaactggaaaaacgcggtattggccgtccttctacctacgcgtctatcatttctaccattcaggatcgtggatacgttcgagtggaaaaccgccgattctatgcggaaaaaatgggtgaaatcgtcaccgaccgtctggaagagaacttccgcgagctgatgaactatgatttcaccgcccgtatggaaagtggtctggatcaggtcgccaacgatcaggctgagtggaaagcggtactcgacgagttttttgccgaatttagcgaacaactggaaaccgcggaaaaagatcctgaagacggcgggatgcgcccgaatcagatggtgatgaccagcattgattgcccgacctgtggccgtcaaatggggattcgaaccgcgagcaccggcgtattcctcggttgttctggctatgccttaccgccgaaagaacgttgtaaaaccaccattaacctggtgccggaaacggaaatactgaacgttctcgaaggggatgatgcggaaactaacgccttgcgcgcccgtcgtcgctgccagatttgtggcaccgctatggacagctatctgatcgatactcaccgtaaactgcacgtgtgtggtaataacccggcttgcgaaggttatgagatcgaagaaggtgaattccgcattaagggttatgaaggcccaatcgttgagtgcgagaaatgtggctccgaaatgcacctgaaattagggcgttttggcaaatacatgggctgtactaacgacgagtgcaagaatacacgtaaaattttacgcagcggcgaagtggctccacctaaagaagatccggtgccgcttcctgaattaccgtgcgaaaaatccgatgcttactttgtattacgtgacggtgcggcgggcgtattcctggcggctaacactttccctaaatctcgcgaaacccgcgcgccgttagtggaagaattagtacgctttaaggaccgtttaccggagaaactgcgttatctggccgatgcgccggtaacggataaagaaggtaacaaaaccctggttcgcttcagtcgtaagaccaaacagcagtatgtttcgtcagagaaggaagggaaggccacgggttggacggcgttctatatcgacggcaagtgggttgaagccaaaaaataaggcagtttttgtggcgctgtgattgcagcgctatgcctgttaataaaaccagtctttgtggctggtttttttatgggctaagtaggagtagtgctttatagttttaacaatccgactattttcgaaatatgatcgacttattttttttgataatgatgagtatggcaagattgttggccattgtttttttattgttaagttctatacagcgctaagcaaaatgttatagtggttatattaaaacttttcttatcgttaaaagatattataaagtcgcttccagtactgttggcataatagcgttaatggttttttacttaataactatttggcttaccagggtgacaccgatataccaaactgtgagatgatcacagcgttcaacctaggatggtatagatatgaaattgcagcagctacgttacatcgttgaggtggtaaaccacaatctcaacgtctcctcgaccgctgaaggcttgtacacttcccagccgggaatcagtaagcaagtcagaatgttggaagatgaactgggtattcagatttttgcccgtagcggtaaacatttgacgcaggttacgccggctggtctggaaattatccgtattgcccgcgaagtattatcgaaggttgatgcgattaaagccgttgccggtgaacatacttaccctgataaaggctcactgtatgttgcgaccactcacactcaggctcgttacgctttacccaatgtgattaaaggttttattgaacgctatccgcgggtgtcactgcatatgcatcaaggctcgccgacccaaattgccgaggcagtatccaaaggcagcgccgattttgcgattgccaccgaagctctgcatctgtatgacgatttgattatgctgccgtgctaccactggaatcgcgcggtggtggtcaaaccggatcatccgttggcaggaaaagcgcacgtcactattgaagaattggcagcttaccctattgtgacctatacctttggtttcacggggcgctccgaactggataccgcttttaatcgcgccggactgacgccgcgaatcgtcttcaccgccaccgatgccgatgtgattaaaacctatgtacgccttggtttaggggttggggttatcgcaagcatggcggttgatccgattcaagatcctgatttggtcacggtagacgcccgcgatatctttacctatagcaccaccaagattggtttccgccgcagtactttcctgcgcagctacatgtatgattttattctacgttttgcaccgcacctgacccgtgatgtggtggataatgcggttgctttacgttcaaatgaagatattgaagccatgtttaaagatattaagctgccggtcaagtaagggcatcatctttattcttgagcgcgtgaatcgcatagtcgttaatcgcgtagccaccgtagaaaccgaatgctcaggccttcggtttttctttttttaaggtgaaaataaaacatccatttttactaaaaatagatattatgagtttcaaccggtcaaagattattgatataaatattatcggatattttaataattgtcgacaatcaataattaatgaaatgtttaatctgaaatgagcgttttataatagacgtaggcattatattacttattctcacctctataaattagaaagtatcttattggaggtaactatgaaaacaacgctgcaaaggccttctgttataaaatatgcaccacagtcatctgcgataaataaaaaacagactaacgatgtgcattggcgaaaaaacatgatgaagatttattccgatactatcactggggtaaaaaacatcagtggtatagaacaatgcggtattgctgaaagattggtgacgaaactaaaagaaaatggagtgatacctccagaacaagacgttatgttcaaaaagaattatttctatttgccactgtataatgaagtttcagtgcgtcaggttattgataaaaatagctcaagaatactatcaggcaaggaaccttaccctattgttttggccgacccgaaactgttttgcaatacggctttggccgcgttggctaaaaataaaagtaaagatatggacagcgagagtaatgaaaaacgatttcagaaactgggcggttgcttaactaaagagttgattaagattaattacaataaaaacccagacaaatttagatcgttggggcgttatctggcattgaaaaaaactcaatacattcgcctggacgaagtgaatccatcttctctggggaagctctatatcgccggatacggtaaaccggagggtgaaatctcaaaattgggtaaatatacgttagaaaactttaatttatcgacggccaatctggtgactaaagatctcctgccattattaaccgccgccgggctacctgttgatatcagaatgctacaaatggaaagtgccgaatccgcagacagcgaaaagcctttagctcaatatatgagtaacgcgctctctgatgctggcgtcccggccagagtgtttggttatagaggtacttctgtcctaaatgagttacatcatattcactcaacccgtgcggtgaaaaatcccatcgataataattttataaaatatgacctttatcgcgccagcgatgtacgccaagaatttttaccgcagaaaaaatcgaaaaaaatgtagataatcctattgtttactctgactatagagtgagtaaatttttgttttcgctgactgttaaatgattattctgctattttcagacattttttaaggcggcgattgataatgtggttggtaaaaaaccctattattatttgtgtatctaaaatggcgatggagtcaccgaagggtaatcaagaaaatttggtggttactcgcggtgtcaatatcactgattctacttaaaattagccggtttttctttcaacatcacattcgtggcaatcggttctgctgctaacacggtcaagccaataaaaaccaaatacgatatagactggccgatttttaatgatgagatgataaaaatgccttctcgatgaatagcatcagaatatggcaagggaaagaacgctacgggatattttcacctcatccaaccaccgtgtttaattaagatttatatcactgtcgtttaaaaaataattaaattcaattattgagataaaagagttccaccctgattcgaaaacgtcagtcgcggggtaatagatctcagtcataaacgtacgacttggaaagcgtctcggggcggtacggtagaaacaggcgttttcatttttatcagtgcgatcggtaattgtcctccatattttcctattgtcatactgaattatccttacgcaaaggatctgatttcccggtaaaaaacacctttaatcgattttacctatcgctatagacaaatgcgttgttatcagaatgttaacctatctttgtgttatatttaaatcaaaccctataaccgagcgggttattctccgccggactgcaccaatatcccaataaaaaccctctgtacagaacaacaaaggagccgctatgtcgttggatctacgaaaaacgagtatgaccacgctggtcgcgttaggtacggaatatcactattacagcttgccgaaagtggctccgctgttaggtgatattgaccggctacctaaatctatgaaagtcctgctggaaaatctattacgccacatcgatggcgatacggtacatgaagaggatctggcggccgtcgctgattggctgaaggatggacatgccgatcgcgaaattgcctatcggcccgcgcgcgtgctgatgcaagatttcactggtgtaccggccgtggtcgatttggccgcgatgcgggaagctgttcaccgtttgggcggcgatgtcaatcaggttaatccgctgtcaccggtcgatctggtgattgaccattcggttaccgttgatgaatttggcgataaagacgcctttggggaaaacgtccggctggaaatggaacgcaaccacgaacgttatatcttcctgcgttgggggcaaaaagcctttaatcgcttccgcgtggtgccgccgggcaccggtatttgtcaccaagtgaatttggaatacctggggcaaacggtgtggcaggaacagcagggcgataaacgggttgcctatccggataccttggtcggaaccgattctcacaccacgatgattaacggcctggggattctaggctggggcgtcggcgggattgaggcggaagcggcgatgttgggccaaccggtatccatgctgattcctgatgtggtggggttcaagctgacggggaaaattcgcgaaggcatcaccgccaccgatttagtgcttaccgtcacccaaatgttgcgaaaacacggggtggtggggaaatttgttgaattctacggcgacggactggccgatttacctttggctgatcgagccactatcgccaatatgtcgccggaatacggcgcaacctgcggtttcttcccggtcgatgaggtcacgctgagttatatgcgcttgagcgggcgcagcgatgcgcaaattgcactggtagaagcctatagcaaggcacaggggctttggcgtcatccgggggatgagccagtgtttaccagttcattatctttggatctcggtagcgtggaatccagtctggccgggccgaaacggccgcaggatcgcgtggcgttgccgaaagtccctcaggcgtttaacgcttttggcgagttggaaattgagggtaagaaagataaggttgagcagattgagttttcactgaacggggaaaatcatcagctggaaaatggcgctgtagtgattgcggccattacttcctgtaccaatacctcaaacccgagcgtactgatggcggcgggtttgctggctaagcgcgccgtagaaaaagggttgaaaaccaaaccttgggtaaaaacgtctttggcccctggttcgaaagtcgtgaccgagtatcttaattcagcgggattaacgccttatctggataatctgggctttaatctggtgggctacggttgtactacctgtattggcaactccgggccattaccggatccaattgaaaaagctatcaaaatcggtgatttaaccgtcggtgccgtgctgtcaggtaaccgtaacttcgagggacgcattcatccgctagtaaaaaccaactggctggcttcaccgccgttggtggtggcctatgcgttggcagggaatatgaagctggatctcacgaccgaatccttaggggaaggtcatgatggtaagcctgtgtatctgaaagatatctggccgagtggaaaggaaattgccaaagcggtggaagaagttaaaaccgaaatgttccgcaaggaatatgcggaagtctttagcggagacaagaactggcaggctattgtggtagaaagcactccgacctacgattggcaggctgattctacctatattcgccatcctcccttctttagtgatatgaaggcggaacctgaaccggtgcaggatatccagaatgcgcggattctagcgattttggcggactctgtcaccaccgaccatatttctcccgcaggcaatatcaaactagatagtccggctggccgctatttgcgggaccgcggtgtggaaatcaaggaatttaactcctacggttcgcgtcgaggaaaccacgaagtcatgatgcgcggcacttttgccaatattcgtatccgcaatgaaatggtaccgggagtggaagggggaatgacgcgacatattccttcaaacaatatcatggcgatttatgacgcggcgatgcaataccagcaggaaaaagtgacgctggcggtgatagccggtaaagaatacggttctggctccagccgcgattgggctgcgaaagggccgcgtttgttaggtattcgcgtggtgattgccgaatccttcgagcgtattcatcgttctaatctgattgggatgggcattttaccgttggaatttccgcagggcgtaacccgtaagactttagggttaagtggggatgaaaccatcagcgtgagtggaatgcagaatctgaaaccggggcaacaggtgccggtgacgctgacttacgccgatggtcgacaggaaatcgtcaatactcgctgtcgtattgataccggtaatgagctgatctacttccagaacgatggcattttacactatgtcattcgcaagatgctgtaatccgctagggtaggtaggtgacgttgtaacgaaaagggtggcaattaggccaccctttgtaggcgcacgtctaaggtgcagctctatgtgcagatgattatattgcgcgcaatacttatgatttgactaatatttatgtcgataataattgaaggataaaatgtagggataaaaacctatcggcggtaaaacctcgcctgcattatttgctgagcaaatgccccattttagccgctttggtcgccatataatgttcgtttttaggattacgacccactaaaagcggcacgcgttcaacgatgttaattccggcttcagtcagaatttcgaccttcttcgggttgttagtcaataagcgaatttctttgatatccaatagtttatagatgtcagcacacagggtgaaatcgcgttcatcggcggcaaaacccagctgatagttggcttccacggtatctgcacccaaatcctgtagcgcataagcgcggattttatttaacaagccaatattgcgaccttcctgacggtgataaatcagcactccacggccttcttccgcgatttgagccagcgcggcttccaactggaacccgcaatcgcagcgtaaactgaacagggcatcgccggtcagacattcggaatgaacccgggaaagcaccggtgtgttacctgaaatatcaccaaaaatcaatgccagatggtcgtgaccggttgccagttcttcaaaaccgaccatcaaaaaatcgccccacggagtaggcaatttggcttctgctacacgttttagctgcatgttagtgttcatattaatacatcaggctcttatacaattattgtagcgcatcctactttcagattcgcggtttaaccagtgaaacgctcgaattataactttcgctacacttgattatttatattgccataagttcaaattattagctgttcaacaaatgagcgatgaaagagagggtaacagataacttcgctatccaatcaattttacgtatattatcaatgaagtaaaaatggcctgcggctaagattaaggctgagtaaagaaaaggatatttgatgttaaacatcgcaaagcgaatcatgattgggactgttcttttattacttatgcccatagcggtctggatctccggttggcattggcagcccggcgcatccggattttggcttaaaggactttttgcgctaacggagactgtcaccgcaccttggggtatcgcgaccagcgttatcctgagcggttggtttttgtggtgtctgcgttttcgccttaaaccggcagtgggtctgctgatgatattaacgttggttattgttttcgggcagggcgtgaaatctctgattaaagaacaggtgcaggaaccgcgcccgttcgtggtctggctggaaaatcagaatcacttaaccagtgaagagttctaccagttgcctcgtaaagaacgcagcgcgatggtgaaagagcagcttcagaatcaaacgctggtaccaaaatggctggtcaaacactggcgctttgaaaccggatttgcttttccctccggacatacggtttttgcggcaacctgggcattgttgggcgttgggttgctttggccacgccgtcattacaaaaccgtcggattattaatggtatgggcgacgggcgtgatgggtagccgtctggtgctaggcatgcattggccgcaggatctgattgtcgcgaccttaattagtggtttgctggtggcactggccacgatgggggttcagcgttggatcggcccattgactattccgccgcaagagcaaaaagaaattgagcagcgagatcaacggttataatcaggggttatggaaatctgattgacggcgctattggcttttggttacagacgccccatatctttactttggcttataattgcgggcgtttctcattattttttaaatgaaagcggtaaaaagtcaaaatagcgttcaagatcgtgctttatcgcgcttcagggtttatttgcgcacagggtcagtgttaatttataacgtcatgtcgccacttttttggcataattcgtcgggtaatccggcctatgggaaagaacgtgaaatatttgctgatttttttgttagtactggttattttcgtgatatcagtcacgttaggggcgaataacgatcaggttgttacctttaactacttattggctcagggcgaataccgcgtatcaacgttattagcaacattgtttgccattgggttgatcttgggttggattatttgcggcctgttttatctacgtgtccgcatttctctgggacgagcagagcgcaaaatcaaacggcttgaactgcaactggaacaacctgctgaagatcgtcactctgcgactcagcctgctgtcagcaaggaataattctctatgttagaactgctgtttctgctgttgcccgtggctgccgcctatggctggtacatgggtcgcagaagcgctcagcaggataaacaacaggatgccaaccgcctgtctcgtgaatacgtggcaggggttaatttccttttatccaatcagcaggacaaagcggtcgatctctttctcgatatgttgaaagaggacagctccaccgttgaagcgcatcttactttaggtaaccttttccgttcgcgtggtgaagttgaccgcgccattcgtatccatcaggctttgatggaaagtgcatcactgacctttgaacaacgcctgctggccattcagcaattaggccgcgactatatggccgccgggctgtatgaccgcgccgaagacatgtttacccaactgattgaagaagctgactttcgcgttggagccttacagcaacttctggttatccatcaggccaccagcgattggatcaaagccattgaagtcgcagaaaaactggtgaagttgggcaaagataagcagcgtagcgaaattgcgcatttctattgcgaactgtcgttgcaagccatgggaagcgacgatctggataaggcgatggggttgctgaaaaaggctgccagcgccgataaagactgcgccagagtgtcaataatgcttgggcgcgttcatatggcgcgcggcgattttgccaaagccgcggaagctttacagcaagtgctggaacaggataaagaagtggtcagcgaggcgctaccgatgctgcacgattgctaccagcatttacagcaaccgcaggcgtggtctgatttcctgaagcgttgcgtagaagacaataccggcgccaccgctgagctgatgctggcagaaattctggaacagcaagacgggcgcgatgtggcacaggtatatattaaccgccagctacaacgccatccaaccatgcgggtattctatcgtttaatggattaccatttggctgatgcggaagaagggcgagccaaagaaagtttgctactgctgcgggatatggtgggcgagcagatcagaacaaaaccgcgctatcgctgccataaatgcggttttaccgcacattcgctctattggcactgtccatcttgccgcgcctgggcgtcggtcaaaccgattcgtgggctggatgggcaataatcgctgaagattgtttaccggcgatgggtggtgggcagcaaacagcagggtgagaacttttctcaccctaatcatgtcattttctatttcttcttttgcgccggtttaacgccatctttgagcaactgacgcagtttcttcaactctttctgactcagcggctgttcggaaatctcttcaattccctggttatcaatctcgctgtgatgcgttttcccgtcctttcggccagctttggcatttttggctgccggattaaaactctgctccagtcgttcacagacttcggagctgagcgaaaactgtttttccagcgcagcggctttaatcttttcttttaattccagagggattttaatggttaaggtcgatacttcgctcatcatgtcacctttaagcaggggaaagtaccaagctatgtgaggtttagcgcgctgtctagttgataacataaaattcacaaaaaattcatatgtcaaatgcaaaaaagagcgcatcggcgctcttcttgtcatagctacatgaaattacttatttcgtaatggggtgcgaaaccgctaattattgataaataacggcggtgccgtgcagcttattattgccgctggcagaggtgatctggaaagattttgcccctgcggcctgtgctttttgagccagcgcgttttccagttcggtcagagtaccggcgttgctgacagagattacgccagttttattcaaacttgctgactgttgggtgttcacgctggttgaagccatgctggtgaaagatgctagggaaagaactaaggcagaggcgatatatttgatgtttttcatgtgaaactccagtccattatgattaagtggaaggcgatgtcttccgatggactgaatgatatagcatctgaaattaatgaaaatctcaaactcctgataatctcattcaatttatttgattgataatttacctttcttgaaactgttttactttctaccggttattaactaccgaacaagactgacccaaattgacctttccgcaatgatttatacatttcgcacctctggcaccttgccgcagtcatggccgtggttatccctgtcatccttagagagataacagggacggaaatctgtaatttcccctcgacgccatgtagaatgccggcggttaatatttttgagtggctgttatagatagcacgccgttagtcgcgaaaggcagccttgattatttgcatatattacagagggtagaaacatgacgtcggatactaaaaccaataataatgactcaggatcttccccgattgtggtcgcattggactatgccgataaaaacgcagctctggcgtttgccgatcgtgttgacccgcgcgattgccggctaaaaatcggcaaagaaatgtttaccctgtttggcccaaagttggtacgtgatctgcatcagcgtgggttcgaggtttttctcgatctgaagtttcacgatattccaaatactaccgctaaagccttggctgccgctgcggaaatgggcgtctggatggtgaatgtccacgccagcggcggcgcgcgtatgatgacggcggcaaaagaagcattgttgccttatggcgcacaggctccgctgttgatagccgtgaccgtgctgaccagtatggaaaaagaagacttactcggcatcggtattgacgccgatccggccgatcacgccgagcgtctggctaaactgactaaaaactgtggcctggatggcgtggtctgttctgcgcaggaagcggtacgtttaaaacagagctgcggcagtgactttaagttggtgacaccgggtattcgtcccgtaggcagtgaggcaggggatcagcgccggattatgacgccacaccaggcgctggcggccggtgtagattatatggtgatcgggcgtccgattacgcaatcagaaaatccggcgcaaacgctgcgagatattcgggcatctttggtgaagggggcttaatggttaacgataataaccgattggtgtattcaacggaaaccgggcgcattgacgaacccgtggtcaaggctgagcgtccaaagggcgacggcatagtccgtatccaacgacaaaccagcgggcgtaaaggtaaaggcgtatgcctgattaccggcgttgatggcagtgatgaaatgctagagaaactggcggcggaattaaagaaaaaatgcggctgcggtggttcattaaaagatggcgttatcgaaattcagggtgataagcgggagctattgaagcagttattggaagctaaaggaatgaaggtcaagctggccggaggttgatatcaggataatacctgttaggggtcgactattttctgacatctctcatttattccgcccatcagtcttttatcatctgaaataatcgcttggtatgcagcaggactgatagcaacgttatttaagcaacaactttcgctgcggtttcaatcaccgccgcagcgaaagatatttcagtggatcaatcaataaggggaataaatagccttattatttacccacctgatgcccgataaccccaccaatagctgcaccacctaacgtacccagtgtgctgccagtcagtacggcaccgcccacggcgccggcaccggcacctatagcggtattacgatcgcgcttggacatattggagcaggcgctcagggataacgctaaagtaatagccagtgcggcggtagcaaatcgtttagtcataatcatcataaattctcctgacgttggcctggaatattgtccattaacacctgggctgccggacattatcccgctggagttacctcaataagtataggcagtactccaactttagctggtgggtcattttttaaagtagcggtatataaaacgttaatctgacttaaatgccagattaatgataatttgacggaaaataacccgtagaaaatagtataaatcactaataaacatttaataggtaaatagtcttaatttgacacctatcgacaggtaaaagcgaggaagtacgtaaaatcgcacgattaatcaataagaacgatagctcatgctctccaatcgatggtgacttcctgattgcccattatgtatgtaggcccaaggttatccgcatttgctgaaacctgaagtcaccgtttgttacgagcaatcctgattggttggcctttctgattaattatggacgggtttctctagccacagcagggtatccaccatattttccattttggcttctacttgtgcaatagcatcggcaataccttgattataataatgagcgccgagttcctgggtaaaaaaatccaataaaaattcggcgtcaaaatcgcctaatttgaactgatgttcgcgctccagatagcgctggattttttgcgccatgagacgggtctgttcacggttaaatacgatttccgccatcttaatctccactatttacgccgatgggatgagcctgtctgcgtattaaattgttgcacaaatgggcaaaagtcgcgctatgcggcgagaaatggcgcggcgtagtaatggcctgacgtatggcaattaatccagaatagcacagggattttgcctcgataaggctgtaaaactgaatgatacctgacagaggtcgtcatctggcggaaggtctggccgtcgggctgcgcaatacccgaatggaatcataagaaacatccattttggcccgctgccagctcggcggttaaacagctatgatagcgatcaccctataataccctcgattagtttatgattagtcatatgatcttggcactcacatttattgaatcaggagatccccatggagctttatctcgatacggcggacgtgactgcggtaaaacggttggcgcgtatcttgcctttacagggtgtgaccactaacccgagtattctggcgaaagagggaaaaccgatctgggaagtgctgcctgctctgcgagatgctctgggaggaaccggcaagctgtttgctcaggtgattgcccgtgatagcgagagaatggtggcggaggcgatgttattgtctcaacgcgtaccggggttggtagtgaaaattccggtgaccagcgaggggctggcggcaattaagaagttgaaaactatgtcgattccaaccttgggtactgccgtgtacggtgcaggtcagggattgctggcggtgctggcgggggcagagtatgtagcgccttatgtcaaccggttagatgcgcaaggtcaggatggcgtggccatggtgcgtgagttgcagcaactactgaatttacacgcgccgcaggccaaagtgctggcggccagtttccgcacgccgaggcaggttttggattgcctgctggcgggctgtcagtcggttactctgccggtagacgtcgccgaacagttgatctcaacgccggcggtacaggctgcggtcgagcagtttgaacacgactggcagggcgcatttgggtcgccgatgctgagttaactgtcctgtgaattagacactgcgctgattttggtttttcacccaataaaaacgcctcatcgttgcggatgaggcgttacgtcgtcacttgattctttgcctgtctaggcggaatatcaggctggaatctctgctaacacgggcatttccctaactttcccccctgactagggaaacgcgcatccagacaataacggtggaattcccgttcggtcatcggcattttttccggatgatgacgccgcatatgctgcagataattaccgtaatcctgcacgccaaccatcaaacgaaaactctgagcagttcgcttggcgatcagcctcatttttccccacagacttttcggctggggcatcaacggagctaaaggaacacagcgcaggatatgcagcccagatcgcgcagcggcagatttatgctggaaaattaaacttgaattaaccacgagcgacctcctcgcgtaatacaatttcgctctcatgagcggtgggttgactggatttcagcgcccgacgcaccacgaagaatgctgaaatcagcatagttaccgccactaacataaagaaagcgcagagggcggcgttaatctggttattaaacacgatagtttccatgtctttaaagcttttggccggagcaatcagtaccccttgttctacgccggttgagaatttctttgcctgcgccaggaaaccaatgctcggtttttcatggaaaatcttctgccaaccggcggtcatcgaggtaataaacaaccagatagtgggaacaatcgtcacccagacatagcgctgtttcttcattttgaacagcaccacggtgcccagaatcagcgccatcgacgccagcatctggttaccaatgccgaacagtggccaaagagtattaatcccgcccaatgggtcaaccaccccttggtagacgaaaaagccccagcaagcgacggcgacggaggttcccgccagattaccgaaccaggaacggttattggccagacttggtaccgctacgccgaccaaatcctgcaccataaagcgacaggcgcgggttcctgcatccactgcggttaaaataaacatagcttcaaacagtatggcaaagtgataccagaacgccatcatattgcggctattaaagacttcactaatgatatgagccatacccacggcgaaggtcggcgcgccaccggctcgcgacagaatggagttttcgcccacgtctttggcaatcatggttaacacttccggcgtcaccacaaatccccaactattgatcgccgccgaggcgctttccacggtagtcccgatcagcgctgccggtgagttcatggcgaagtaaacgccgggatcgatcaccgaggcgcaaatcaaagccatgatagcgacgaaagattccatcagcatcgcgccgtagccaataaagcgaatgtggctttcccgctctaccaatttaggcgtggtgccgctggaaaccagggcgtggaagccagagatagctccgcaggcaatggtgataaacaggaacgggaacaggctgccggagaacaccgggccactgccgtcaataaaccgggataccgcaggcatcttcatttccggcatagcgaagacaattccgatagccaaaccaatgatgacgccgattttcaggaaggtagacagataatcacgaggagccagtaacagccagaccggcagcactgaggcaacaaaaccgtagatcaccaatacccaggtcagggtagtgccgtgtaacgtgaagaacggtccccaataagggtgaagggcaatatttccaccgtaaataatggcggccatcatcagcacgaaaccgagcagggaaacctcagcaattttccccggacgcaggtagcgcatatacacgcccataaacagcgcgataggaatggtggcggcgatagtgaataacccccacgggctatctgccagcgctttgaccaccaccaacgctagggcggacaggataataatcatgacccccaatgcgccaagcatggtaatcaccccggcgaatgcccccagctcttgcttcgccatttcacccaacgagcgaccatctcggcgggttgaaataaacagaatcaggaagtcttgcactgccccggccatcatgacgccgaccaagatccagatagtgcccggcaaaaagcccatttgtgcggccagaattggcccgaccagcgggcctgcaccggcgatggcggcaaagtggtggccgaacagcacccatttgttggtcggaacgtagtccagaccgtcattgcgccgttcggcgggcgtcaggcggcgatcatccaactcaaagatattcttggcgataaacaggctgtagaaacggtaagcgatgctgtagcaggctaccgcggcgataactaaccagatagcatttacgtgttcgccgcggctgagtgccagcatggcaaaggcaaaagcaccgattaacgccacaatcagccagataacggcggtcttgacgtttttcatgaacaacaactcctttgttggtaggggcagagtgtgagggtgtaggtctatttgattaacgactcgttaacatatgatcttcaacgtggaagaaaagcccatagagcgaaatctgtgatgaacgaattattttaatgtcaatattgtttgcatttgctgacaaattgcgagctgacaggtttttttgactggggaagtcagtgggggaataggcaaaaagaataaaaaaaaaaccgcgggatagttggctatccacacggtttttaacgaacaacacctagtttcaggcggctgggcgggcgatcacattccgggtttccatacggacttccgcgatgacaacctcgattttatcgctctgacggtaaaccacttcaccgttgatttgtacggtgccggtttcctgactgcacaccatctcatcacgcaccgcgtgaataaatggcgcaggaataaaggcgaccgcgccgttatccagtaaacgaatgcgtaaaccaccgcgagtcacatcgataatttccgctgggaaacgggtatcggtacccgcgcttggctgtaaataacgggcgtacagccagtcacctacatcgcgctcggccatacggttcaggcggcggcgttcggccagttgaacggtaatctcttcctgcggtttttcggcctgttgaccggtaatcaccgctttcagcagccgatggttaaccatatcgccgtatttacgaattggcgatgtccaggtggcgtaagcctctaaacctaagccaaagtgcgggcctggctcgatgctgatttccgcaaaggtctggaaacgacgaatacggctatcgaggaactgggttggcaacgaatcaagatggcgacgcagttcgcagaagcccggtaacgtcagtagagcttgaggatcggcttccacttcgttggttttcagcactgccgctgcctgctcgactagggccgggtcaaaaccggtgtgaacgttatagattccaaagcccagacgctcgcgcagcacaatggcagcacagacgttggcggtaatcatgcattcttccacaatgcggttggcaatgcggcgttgctcaacgatgatatccagcacttcgcctttctcacccaacaggaagcggtagtctggacgatctttaaacaccagcgcattcttctgacgccaggcgttacgcgcgttacatacgcgttgcagcagcttgatttgctcagcgatttcggcgttctgcggctgccagtcaccttgattttccagccagtcagacacttcatcgtaaaccagcttggctttagactcgacccaggcgacagaaaatgaaatatcatcgcccagcgtaccgtcttcggcgatggtaacccgacaaaccagtaccggacggcgctcattcggacgcaaagaacacaggttatcggacagatctcgcggcagcatcgggatgttgaagcccggtaggtagttggtgaaagcacgtttacgcgcaatcagatccagctcgctgttttcgtccacgtaggaggtcggatcggcaatggcgatagtcagcaacagattgccgtcgcctttgtctgccacatgcagcgcatcgtccatatcttcggtgctggcgctgtcgatagtaacgaagttcagtgcagttaagtcttcacgctccaaaccgtcctgctttagttctgcggccaccatggttggcgcttcgcgctccagattatgacgggagagggtgacccaccacggaacgaaatgatcgtcggcatgagtgataaaggcggttaaatcagcgttgaaagcgcgatcgccttttagcggatggcggcgcatttcggctacggcccaatcaccgttttggaaatcgtgggttaactcgcgtaccggacgacaagggatagcatcccgcagcaaaggatggtctggaataatcgacaggcggtcatcttttctctgcactttaccgacaaagcgagagagaaaaggctcgaccagagactctggctcagcaatttcacgatctttttcggtatgaagagtggcgactatacggtcgccgtgcatgaccttcttcatatacggcggtgggataaagtaacttttctgcccatctacctcaagaaagccaaagcctttctcagtcccttttaccacgccttcaacgcgtggggtctgagtgtgaagttgctgtttaagctgcgccagcagcgggttatcttgaaacatatcgtccagtgaatggtgtagtgagtcgagtgattcgcggctgacagttttacgcgaatcagccgcgtcgggcaagcgtcatatcactctgatgcacaaatcccttaaataattcagggcataatgaatgccctgcataagagaaatatttctaactcaggcaatacgttgcgagcgtggctcttgccacggacgtatcaccaccggaatagatttggacgttggcgtatgggtttgatcgccaaaacttgatagcgggactaatggattggtttccggataataggccgccagattgccacggggaatgtcataactgaccagtttaaaaccgttaaccttacgggtaataccgtcattccacagcgtttcaatttctacctgattaccatccgccaaacctaaatccgccaaatcctgcgggttgataaacaggacttcccgctgcccataaacgccccgatagcgatcgtccaatccgtaaatggtggtgttgtattgatcgtgagaacgaagggtttgtagcacgaaaggcgcgttggtattgccaatctgcgggaacagactgtttggtaaaggcgcgtcgctgaactcggcttttccgctggcagtggcgaatttcaattcggcggcggtactgccgagatagaaaccgcccggctgctcgcaacgggcgttaaaatcgctaaaacccggcactgtggcggcgatatggtcgcgaatcaagtgataatcgtccgctaacgctagccagttcagtttatcgcagcccagcactgcatcggcgatggcacagacaatggcggtctccgaacgttggctatcggacagcggtttacccacgccttcagaagcgtgcaccatgctaaaggagtcctctacggtgatgtattgcgagccggtggcttgcatatctcgttcggtacgccccaacgtcggcagaattaaggcgtcggcaccggtcaccaaatggctgcgattcagcttggtgctgatatgcacggttaaatcacagcagcgcagcgcctgagcggtccgttgggtatccggtgcagcggcggccagattcccacccagggctatcaaaactttcacttcaccacgcagcatggcttccagcgcttccacggtattgtgaccggcttctctcggcggagtgaaatcaaagtgtgcggccagtcgatccaacatagcggcggacggtttttcgtcgatacccatggttcggttgccctgtacgttgctgtgaccacgtaccggacacaggcccgctcccggtttaccgagctgaccgaacagcaactgcatgttggtcatttcccgcaccgtggccacggagtgcttgtgctgagtaatgcccattgcccaagtgaaaataacccgttcggcatgctggtaaacccgtgcagcgtggcgcagctgctcttcgctcaagcctgattgttgggtgattttctgccaggaggtgcggtcgacggcggcaaagtaggcggaagagcctcgcgtatgcagatcgataaacgtctgatcgaaaatgccgtctaaccccatagagagctgctcgcgatgcgtttccagcagggctttcaccataccgcgcaccgccgccatatcaccgcctaaattcggctgataataggatgagctgatcggagaagacttcggcgtaagcagctcaatcgggttctgcgggtcggcaaaacgctccagaccgcgttcccgcagcgtattaaaactgacaatgcgcgcgccgcgatccttggcgtgacgcaggctgtgcaacattcgcggatgattggtgccgggattttggccaaagacaaaaatggcgtccgcccgttcaaaatcttccatacgaatggtgcctttacccacgccgatactttggcttagcccggtgccgctggcttcatggcacatattcgaacaatcaggaaaattattcgtacccagcattcggccaaacagttggtataaataggacgcttcgttactggcgcgaccggaggtatacaactctaactgattcggattattcatcgcgccgatgtgatgggcaatcaaccccaacgcttcttcccagcttaccgggcgatagcggtcgctgctggcatcgtagcgcattgggtgggtaatacggccttggtattccagaaagtaatcgctttgctggctaagcgttgtcacggtatgcgtggcgaagaattctggatcgacggctttgcgcgtagcctcccaactgacggctttggcaccgttctcgcaaaaactgaaggtgctgtgattatcatcaccccaggcacagccgggacagtcaaaacctttgacctgattgacccgcagcagattacggatattggcaagcgcacgtttgctgtccagcacaaaacgggtcgtagcttccagggaaccccaaccaccggctgcggcagtataaggtttgatcgatggtttgaatttcatgattaatggccgcagatgttgtttcgaataagtaaattattatttaaatacttgagaataatttgtcacaagtctagtgcggcggcgggagggcgtctaatcgaatgccgcaatcgcggcatagaggatatttatcgcggtaaaatagcgttgatttgggatgaggctaggctgtgaagcgcggctttgcgggatagcagggcgaacatcatcagttttccgggtaaaccttatctttaaattcgcataaatcttcaataatgcaggaaccacagcgaggtttacgggcaatacaggtgtatctgccgtgtaaaatcaaccagtggtgacagtcctgcttgaactcggcgggcacgactttcagcaacttttcttcaacctgatcgacattcttaccaggggcaaagtgggtgcggttacagacccggaaaatatgggtatcgacggcgatagtcggccaaccaaaagcggtgttcagtaccacgttggccgttttgcgtcccacccccggcagtgcttccagtgccgcccgatcctccggtacttccccctgatgtttttccagcagaatgcagcaggttttaatcacattttccgctttggtattaaacagcccaatggttttgatataggacttcaaaccgtccacgcccaaatccagtatggcctgcggcgtattcgccaccggatacagcttggcggtagctttattgacgctgacatcagttgcctgtgccgatagcagcaccgcaatgagtagctcaaacgggctggtaaacatcaattcggtggttgggtgcggattgttctcgcgcaggcgagtcaaaatctcgatgcgtttctgtttattcatcaggctttctcaaccattcctttgggcaccgcctcagcggcgactcgccgggctttacgggctttcattttttcatcaatcacatattttactgccagtaataatccgaggccgataaaagcgccgggcggcagcatggccagaagaaacggactatccagatgcacgatttgaacccgcagcaccttagcccagttgcccagcagcagatctgcgccgtcgaatagggtgccgttgcccagaatttcccgcagcgaaccgagaacaaacagagcgccggttgcgcctaaccccattgccagcccgtccagcgccgagagcccgattggatttttggcagcataagcttcggcgcggccaatcacgatacagttggtcacgataagcggaataaagatccctaaagactgatataaaccaaaggcataagcattaatcagcatttgaaccgtgctcactaccgaggcgataatcatcacgtaaatagggatgcgaatctcgtttggcacccaacggcgtagggctgaaacggccgtattggtacagaccagcaccaacgtcgtcgccagccccagcccaagggcgttagtcgcggtggaggagaccgccagcaaagggcacagccccagcaattgcaccagcgcagagttattcttccacaacccttgcaccatcaaattcttagcttcactcattgttcaactccgcaagttggcagggtagacagcctggctggcagggtttccataaacagcgcggtatttttaacggcgcgaactaccgcccttggggtgatggtggcaccggtaaattgatcgaaagtaccgccgtctttaatgactgcccagcgcttatcgtctttgccttcaacctgttgattactgaaacgggtaatccagtcagaaatgcgaatatcaattttatctcccaacccaggcgtttcgtgatgttccatcacccggctgccgaggactttaccttgaaaatctgcgccaaccaacagctgaatagcaccggaatagccatctggcgcggtactctctatggcggcggcaacgggcttgccgtctttacgcgccagatacaggcgatgtggcgcggtgttgcctaatgccggatcagtgacaacgtaacactcaccctgcatatcgttatcgtataactctgcgggaaccacttgatctaacaatgccttctgctgcaaggctgcctgatgagcaatggtattttgtgtcaggctgttcactacggcggtcaggccggtggccagcgcggcaaagacggccagcgtcacgccgtgacgtttcatggtagctagcatggcactctccttacttgtggccgtaaacgcgtggctgggtgtaatgatcgatcaacggcacggtgatattcgccagtagcacggcaaaggcgacgccgtccggatagccgccgtaaacgcgaattaaccagaccagcaacccgatcagtgcgccaaaaatcaggcgaccacgcggtgtcgtggaggcgctaaccggatcggtcgcaataaagaaggcccccagcatggtcgcgccagagaacaaatgcagcaatggtgaaccgaagctttccggtgccagcagccagcttaatccggcgcagacgctcaaagacagcagaaaactgaacggaatatgccagtgaatgacttttcgccacagtaagaacaggccgccggctaaaaagccaaggttaatccactgccagcctaaaccggccagaacgccgccaaatagcggttgctgtagaatttctctcgccggcaggctgcgcagcgaggttttgaagctgtccaacggcgtcgcctggctgacgccatcatagcctagctgtaaatcacgaatgctcgcgccttgagaggtgtggccggtaaaaatggtcaacagactgtcgtaaaaaccaatgctattggcttgcaggctgatcgggggcatccagctggtcatttgcaccgggaaagagatcagcaacaccacataacccaccatcgccggattgaaaggattttgccctaaaccgccatacaattgcttggcaatgacgatcgcaaaaaaggtgcccaacacgatcatccaccacggagccagcggcggcaggctaattcccagtagcaaaccggtaagtagcgcagaattgtcggccagccgcgttttaatcggctgtttacgtaaagccagcactgcactttcggtcagcactgcggttatcatggccagcaccatctgaatcaggctaccaaaaccgaagaaataggtctgagcggcgatgccgggaagacaggccagcatcaccagcaacataatgctgcgggtgctgcgctgattatgagtgaaaggggaactggctatttgtaaccctttggtgagggtgtgttgcactggcctgaatttcatgaagttacaaccataggttcgtataggtaatcaaggttcttaacgttgttgtgcgccgccgggcggggtacttgccggggaaacacacttggccattagggatatattgggctggcgcattctaccctaatcacggcaagggtaatacgtcttaattataagggtattatcccgataaaggagaaatgattaaacgatgctaatcggaaggtgattattcgcagtgtacatttctcttgcatttctgcactaattagtgacaacgcattcggtaaaaatgcacttttatttatgtggctaccggtttgttacttaaaagtaatgaaagtcgcatcaaaaaagcaaggcttgtatattaatgtaaattaactaacaccatgtatttatacgtattatttgttgattttagccttggctaaaaaaccattggtttcaggtcagattaatgtagtatgcagtgtaattatatatttgaagatctcagtaatgatgaacgaagacgtattgtttattgaagaacttattgaatggatcgaaattaatttagagaaaagaccgacgttggatgatgttgccaaaatctcgggttattcaaaatggcacctacaacggaagtttaaaagtattgtcggcctgcaactggcgtcttatatccgtggtcgggttttgactcgcgcggcggtggcgctgcgtatttctcgccgtcctatcatcgaaatttccgatgcgttgggctttgactcgcagcaaacttttacccgtacgtttaagaaacgttttggcaccacgcccaaccatttccgtctacaggataaatggaacgtagagggcatgatcccgcgctttagtttctatgagaactatacgccggagattaaacctctgacgctggaagccaaagagctggtcggtattactcgccgtctgaactttgatgaacgtaatctatgcagcggacagcatgcgtcctgcatggcaatgaaggatgagattctgctcgatttctttaaggagatgaatttcaccagccagcggatttatgcggttttctcagtcgatcctgacgagcgagatcaaagcagcttctattactcaacggcggtagataaagatcagcgccatgagttgcatggtaatagcgaaaccaacagtttcactatcccagggggggaatttctgtctatttctcatcagggtagtgcgaaggaatgcgtgaagttttcttcttatttgttcaatgaggttttgccgaagattcgagaggaagtgaagggcagcattgagatggaagtgattgaagtagagcactgtcattcggaagcgaaaatgcgtgatatcgacgtggtatatcagtatttgatttccgtagattaatccagttttcactccccgcatctgatcgttcggccatccaagtaacgggatggccgatgacgctgattttacgaagatattgctgatttttctgcggcttttttggctttgactctggcaatggctgccgccaccgccgctttacgcggatcgtccgtcgggttattcacggcttcgctgacgacgggagtggcgctgtcatcttgttgattttgcgcggcttttttggctttgactctggcaatggctgccgccaccgccgctttacgcggatcgtccgtcgggttattcacggcttcgctggcgacgggagtggtgatggcatcttgttgattttgcgcagcttttttggctttgactctggcaatggctgccgccaccgccgctttacgcggatcgtccgtcgggttatccacggcttcgctggcgacgggagtggcgctggcatcttgttgattttgcgcggcttttttggctttgactctggcaatggctgccgccaccgccgctttacgcggatcgtccgtcgggttattcacggcttcgctggcgacgggagtggtgatggcatcttgttgattttgcgcggcttttttggctttgactctggcaatggctgccgccaccgccgctttacgcggatcgtccgtcgggttattcacggcttcgctgacgacgggagtggcgctgtcatcttgttgattttgagcggcttttttggctttgactctggcaatggctgccgccaccgccgcctgacgatcgtcggttgattctggtgtagacgttgtcgcttcgcgtttttctgcctgacgtgctcgagcctgtgcttttctggcttctcgagcggcgatgatggcactgttatctggcatttcacctggttgtacgttaatcgctgtgtcggaagatttctgcgccgcaattcgctccatcgcagcctgtactgcctgttgatcgctatcggtcaatttgaccgctgcttgtttatgtcgttgttctctagcctgtttttcccgttccagacgagcctgtttggcctcaaaacgcgccttggcttcggccgctcgcgcagcctcctgatccagcgctttaatttcggctttttcttttctgtaatactgcactaacggaatattactcgggcaaacataggcacaggcaccacactcaatacaatcaaacagattatgattgcgggctttttcatgctcttcgccgcggctgaaccagtaaagctgctgtggcaacagccccgccgggcaggcatcgacacacagcccgcagcgaatacaggcttcttcctgctcgctgataccgatctcggtttcagcgggagccagaatacagttactgattttgactatcggcacatccagacttggcagcgtaaagcccatcagtgggccgcccataatcaccattggctgcgcttgcggagtaaagccagccagcgccagcagatggagcaccggcgtaccgatcctggcccagaaattgccgggacgagaaagggcgtcgccggtcagagtcacgacacgctcaatcagcggttcgccgtcgataatagctcttttgatcgcgacgacggttccaacgttttgcatcaatacaccgatggctgaggaatgcttaccgaaaggcacttcctgaccggtcagaattttagtgagctgtttggctccgccggaaggatatttggtcggtatgacgcgtaacagaatcgacgaatggccggccaacgactgcttcagggcttcaatggcttccggtttattgtcttcgatgccaatcaacacccgctcaggttgtagcaagtgaattaagatattgattccgctgaccacttcgtcggcatgatcctgcatcagtcgatcatcggcggtaatataaggttcacattcggcggcgttaatgattaaggttttaacgccgtttaaaccaccctgtaatttgcttgccgtagggaatcccgcgccgcccagcccggcaataccggcctgatgaatacgttccaacaaatcgtggggctgagcctgctgataatcgggtaggggatggcgttcacaccagcggtcttctccatccggtgtaatatgtacacaaatctcggctaaaccagatggatgcgcagtcgtgtgtggcgcaattgcagtgatcaaaccggatgtcggcgcatgaaccgggacggtgcgtccgcgcccaacggtcagcggctgacctttcaacacgttatcgcccgcttttactcgtagttcgccttccggccctaaatgctgctggagcgggataataaattgatcgggaagcggcgcaatacgcatgggtacgcggctggattgcactttcatttccggtggatgaatgccgccatcaaagtcccagattttatctttcttacgcggtgtaaatagcttaaacatgttgctccacgtcgatcaatttcactggaataatctgtgatgggacggttttcaccggaatagcgttgagatcccacttccagttggcggtcgtggtaggaaccggaatcatttcaatacaatcggttgggcaaggatcaacgcataaatcacaaccggtacagagatccggcaatactgtatgcatggcgcgggttgcgcccacaatggcatcgaccgggcaggcctgaatacacttggtgcagccaatacagttgctttcatcaataaatgccactttccgcaccggattggccagcgtttcgtcgccgtccaacggttgcggttctacgcccagtaaatcagccagtttaagcataacctgctcgccgccgggggcacatttattgattttttcgccgctgttggagaccgcttcagcataaggacgacagccgggatagccacattggccacactggctttgtggcagaagctcgtcgacctgctcaacgatgggatcttcgtctacctgaaaccggcgcgcggcaaagcctagcaccacaccggaaattagcgctagcatgctgagtgcgccaatagcaatccataacgacatcattagaatttcaccagccccgtaaagcccataaaagctaatgacatcagcccggccgtaatcaatgcaatggaggaaccacggaatggcgcgggaacatcggcgaccgccagacgctcgcggatagccgcgaagagaaccatcaccaaagagaagcccgccgcggcgctaaaaccgtaaacggctgattgaaggaaattatgtgactggttcacgttcagcagggccacgcccaataccgcgcagttggttgtaatcaatggcaaaaatatccccagcagacgatatagcgccggactggttttgcgtaccactaactcggtgaattgcaccactacggcaataaccagaatgaatgccagcgttcgtaaataaactagccccaaaggcagcaaaataaagctgttcaccatccacgcgcataccgacgccagcgtcagtacaaaagtggttgccagccccatgccgatagcggtttccagttttttggaaacgcccataaacggacacaggccaagaaatttgaccagcacaaagttatttaccagaacggtgctaacgaacaaaagcaggtattcagtcattgcggaacctaaaaaaataaaagccgcctattatccgaaattggcggcctgacgacaacagatgaaatgcagggttattgcatttttccctcgattttatggggaattagtgcgttgcggccttaaatctccgtaaaagtcccttttacccgaacagatttttgcatatagggtacaaagcaagctgctgccaacagaggccagccgagggctctcagggcaacttcatcggaaattggtgcgaaggcgaaggctttcagtgccagaagaaccgtcagcaacagccacaaaataaacagtttagggaaacggcgggaacggctgcaaaacagccatagcatccacagcgtgaagccccacataaacagcgttgtcaccacagaaaagtaccattgaagggtaaatgcctgtgagttggccataaggtattcccgcgactctggtgtgaccaccgccatagcatacagtgccaacatcaacgtagcgctgagcaaggtgacaatcagataggccattggtgccagtaaccaaccgccgattcgctgatattcttcagagtgagacatgacaaaaccttattcttcattacgcattaatggccggataaccggccaacagatcgttagcttaacccgtagatatgcccttcgtcatctatatcaatatgatggtaggcaggcaaactacctagccccggcatggtcatgatattcccagcgtaaacccgaacaaaaccggctccggcggatacggcgcaagaagtaatcggtagcgtgaagtcacggggaacgttctttttcgcggggtctgcactgattgataacggcgttttagcaacgcacagcggcaagtgaccaaagccctgctcggtaatatccgccagttgctggcgcgccagcgggctgagcagtacctctttggctccataacgttcggctaaacggttcagtttggcttccaatgacatgtcgttcgaataaggcaatttcggtgtattagggttgtcgcaggctgccagtacgcagcgtgccagttgctcagtgcctgcaccgccggtggcaaaggcatggctaagttcgcaggcctgcgctccggcagataaggcgaaatcttgcaggaaggcaagctcctcctcgctatcggtcgggaaatggtttatggcgacgaccacaggtaaaccgtagctggcggcattatcaatatgccatttcaggttagcgcaacccttggcgagcagaggaatattgctgtcagcaatttctgctggcaaagactggcccggtttaatgtcaaaatcgccgctgttagctttgaggctgcgtaacgtagccaccagaaccacgcaggaaggagcgatgccagattggcgatatttgatattgaagaatttctccatccccatatctgagccaaaaccggcctcggtgacgacacaatctgccagttgcaggcctaaacgatcggcgagtacggatgagttaccgtgcgcgatattggcgaaggggcccgcgtgaatcaacaccggcgtttgctcgctggtttgcattaacgttgggtgaatactgtctttcatcaacgcagtcatggcacccgctacgcctaaatcatcggcggtaataggttgaccgctggtggaataagccagaataattcggccgatacgacggcgcatatcctgcaatccctccgccagcgcgagaatagccataagctccgaagcggctgttatttctacgcggtcggctcgttccacgccgtggctgccacctcccacccctacggtaatctggcgcagagcacgatcgttatgatccagtacccttggccatagaatgcgatgtggatcgatactcagccgttccatgccggtctgcgggccgaaatcctcaccgagacgttgttcgtggtaaaggcgagcgtccagtgcggcggcggccagattatgggctgaactgatggcgtggatatcgccggtcagatgaaggttgagcttttccatcggtaaaacttgcgacgcgccaccgccggcggcaccgcccttaacgccaaacaccgggccaagactcggttgacgaatacaggcgacacaccgcacgccgagtcggttgatgccttggctgagcccgatggttgtgacggttttaccttcgcctaatggggtaggtgtaatgctggaaaccaggaccaatttgccctgcggcttgtcggcatcaatacaatcgatatcaattttagccatgtgcttcccatagggaatcaaagcttcatcggctaccccaaggctgcgggcgacggcctcaataggcagcaaagcaggggcaacgggcttgttttcaatcgtcgataatttttgtgtcatggcgataggtgttcctgttatttggcggcagagcaactggctgaacataacccgtgaattatgtcatagaccggagaggaagcttggcagcaaatcaacaaaatgcgaatcaacgcgaaaaataaaaagaaactgatgtaaataaaccggggatattgcagaggacttgttttgaacatattttaaccatcagtgccgagggcgatttgttgataataatcctcaaataaaaatattaaaaaataatgtattaatagctgttaactttcattattaatgcttaataaagttttaatactattaaagaaatgaagtagatagagatagagaacaagaaaaaataaccaaaatctgtccatatcgattgtgattcccctgcctttaccctgaagcggatcgagtttatggcattaaatttatatgatgtgtttttattttaattcattaaaaacaatatgataaagaaatgggtttatgataaacccttaaagttgtatattaaatgcatgtttaaggatatgatgatgcctcgaacgatagccgatggaacattgatcaccgttagattcaaacgatgagcgaaggaacggcaatacattctaaatgatttagaacgaggtaatgatgacgcaaatatcaatgtcagatatgaaagataaagggcgtttaatcacagactggcggccggaagatgctattttctggaaactacgtggtcaatttgtagcaagacggaatctctggatttctattttctgtctgctattagcttattgtgtctggatgttatttagcgcattggcagttaatttaaatcacgtcggattttcattttcggcagaccaactgtttatgctggccgcattaccttcggtatctggcacgttattgcgggtagcttattcctttatggtgccaatttttggtggtagacgctggaccgcggtgagcacggggtttttgattatcccctgcgtgtggctaggttttgcggtgcagaaccccaagaccacctttgaaaccttcgtcattatcgctctactatgcgggtttgccggagccaattttgcttccagcatgggaaatatcagcttcttttacccgaaagataaacaagggcaggcgcttggttataacggcggtttgggcaatattggcgtaagcctgatgcaattggtggtacccattgctatttcggtttcgttgtttagcgcctttggcagcgcagggaaactgatgcccgatggggaaacgctgtggctggagaatgcggcgtggatctgggtcattccccttggcatcgccacgctactggcctggtttggcatgaacgatctggcgatgaacaaaacttccgtcggcaaacagttcggcattttgaagaaccgccatttatgggttctgggattattgtatctggcgtcttatggctcattcatcggttttgccgctgcttttgccatgctatccaccattgaattccctgaggtcgagatactctattacgccttctttggcccgtttctcggtgcattagcgcgctccgtgggcggaatcatggcggatcgttttagtggcgtattggtcaccgcgctcaattttgttgtgatggcgctactgatcctgttgttgattatgacattaccggatgctaatagtcctggctcgtttgttgcttttttcagcgtctttatgctgctgtttatcactgcagggctgggcagcggttcaacctatcaaatgatcgcggtggtctttcgtaaaagtactgccgacaaaataaaagcgcagggcggcagtcaggaagaagcggagcgtcacggcgtggctgataccgccaccgctctgggctttatttccgtgattggtgcatcgggtggcttctttattccgaaagtcatgggctcgtcattggcaatgaccggctcggtctttacagcaatgttgtttatttttgtgctttatattttatccatcacgatgacttggctggtttatggcagaagaaaagggtgttaacgtccgccataacgccagagaaaagttgttcagtgtttacaaagagggttatatgcaggaactcatttgctacaaaaaaatgccggtttggaacagtcgcacgttgcctgcgatgttccaggaaaaacacaataccaaagacggtacctgggccaagctgacgatattgcaaggcgagctgactttttcattgctcacggaagacggggaagacattgagtccttcatttttagcaaggttaaccagccgaaaatgatcgagccgcaggtatggcaccggattgcgtctttctctgatgatatagaatgccagctagagtttctctgcacgccagaagatttctatcataaaaaatacgctttgacgccgactcattcggaggttatcaacgctgcccgtctgataacaccttgtaaagcgatggatttgggctgtggttccggccgtaattcactgtatctcaatctgctcggttttgatgtggatgcctgcgatcacaacgctcagtcggtggaatttattgatgaaattattgaaaaggaagggctgcaaaacatccatacgcaggtacgtgatattaacgatctggtgatcgacggtcagtacggtttaattttatctaccgtggtgtttatgtttctcgaccgtcagaagataccggcgattatcgacaatatgcaacaatcgactcagcctggcggttataacctgatcgtggccgcgatgtctacggatgattacccgtgcaatatgcctttttccttcacctttaaacacaatgagttgaaagaatattatcgggattggactatcgtgaaatacaacgaggaccttggggctttgcataagaaagatgcagaaggcaacagaatcaaactgcgctttgccactttattagccaagaaaggttagcaaaaaatgtttgcgaagaaagattagctaaacatgtttacgaaaaagtgagttaagaataatagttagccaaacatagttagccaaggcaaacgagtgtgcgaatcaatatccggtcgagcgaatcaagggggataggctaaaaacgcaatgtcattatggataaatagcatgatgaataaacgcaatgacgctctcaaagtcgctgtgccgtatattgagcgtttgcgatagctatagccttaaaggaataaggcgcaataaaaacgctctggccactacggagcagagcgttttttcatcgtcatgatgttatttgcgattacggttttaaagcgattaacctcagcgaggtgggcaaccgatatttagcgttgatcgccgttgctttcaatcactttttgataccagaagaagctttttttacgttgacgcgcgagctgcttttggtgatcaacgtagacaaagccatactgcttctggaatccattaagccagctgagcaaatcgataaatgaccaagggtagtatccgcgtacatccgccccttgcttgattgcatcttcaatagcaccgatatgctggttgagataatcaatacgatcgtcgtccaccacttcgccatcgataataggatctttagcgcctaagccattttcggtgatgtagatcggaatatcaccataacgggctttgatattcatgatgccttcggtcagaccttgagggtagatttcccaatcccagtcggtgtaaacgccgtttggattacggacaaacttgaacagtcctttgaaaccgaattcattaccctgctggtggcctgcgcctttttgcccggttgtattaatctttagctgagtatcctgattattggcggcgatagtctcgcgcttatagtaattcaagccaataaagtcgcagatattgctgcgtaacagtgcgtcatcccctggtgcaaacctcggaactccccagatagcctgagcttgctccagcaactcggcaggatattcgcctttcagcacaggatcgtatagccagtgggtgaaaatgccttcagccagattgaaagccgccatatcttccgcagagtggctcagcggtgtatgggtttgcagcacgttcacaaaaccaatcttcccgtcgataccgcaggaacggaaagccgctactgctttagcgtgagccacaaatacgtggtgacaggcttgaatggcgcgcgcaggttcctgaacgcccggtgggtgcgcgccagtaatatatccgaaaccaatgaaacacacagtttcattgaatgttgaccagagtttgacccgatcaccgtatgactcatagcaaaggcgagcatattcttcgaaagcatcggcagtactgcgagcttcccagccgccttcatcctgtaatgcttgaggtaaatcccagtgatacagggtaatcattggctcaatgttgtgttccaacaaagcatcgatcaaatcgctatagaattttacgccggctggattgacttccccacggcccgtaggtaacaggcgaggccaggaaatagagaaacggtaacttttcattcccatttcggccatcaacgcgacgtcttcacggaagcgatggtagtgatctacggccacatcgccgttcgttccctgataggtcgtacccggtaaatgggagaaggtatcccagatggaaaggcccttgccgtcggcgtcgtaagccccttcaacctgataggcggcgctggcggcgccccagaggaaatcttttggaaaagcagacataaaacattcgctccacgtaaattgaaaatgggatcgtccaatttgttaagtttagtgtaagcggaatagatttattcctgcaaccggtttctgaaaccggttgcaggaaaatgaatgtcactttgcgcaacatcaattttaatcggtatgaagagaatttcagaagaaaacagaaaaattcagcatgtgtgggagcgatttatcaccttgtcagatgggtaacaaccgactttaaacataccagacaatccagtatgagaacctgatgctagtaagcgtttttgcgggaagaacgcataagattctgaataaatgagggggaggttaacgcgggttgagtgggatgaatcactgattattgacatctagatagctgattgagaagggcttcgcgtcaatgatttcccggtagagaggagcaatgttatatcaccgccgcaatattgaacctcatgatctttatctatcgcatcgtctatcgcgaggacggtatcacctggagaatagcgatcacatcgtgcggatttagcctgattgtccgggtggaaagggaattagctcttgttcagagtgacatcatggtgtcaaatcgatccagatttaaaatagaaaaagctaatggcgagaggataaacgatggctgaaaatattagagttgggttgctgggctacggttatgccagtaaaacctttcacgcgccgctgatttcggggactcccggcgtagaatttgcggccgtctccagcagcgatgccagtaaagtgcacgccgactggccgtcggttaccgtggtgaacgatgctcaacatttatttgacgatccgagcatcgatgtcattgttattcctactcccaatgatacccactttccattggcgcaacgggcgctggccgcaggcaagcatgtggtcgtggataagccgtttaccgtgacgctgtcacaagctaacgagctaaaacgcctggcagatgaggccggtttgctattgtcggtttttcacaatcgtcgttgggacagtgattttctgacgctgaaaaccttgctgaaggaaggtgcgttaggagatgtcgtgtatttcgaatctcatttcgatcggttccgtccggaaattcgtcagcgctggcgggaacaacccggagccggcagcggtatctggtatgacttagggccacatttgctggatcaggcgttgcagctgtttggactgccggaaacccttaatgtcgatcttggtttgctgcgtcccggcgcacagtcggtggactatttccacgcggtattaagctatcctggccaacgtgttgtgttacatggcacggtgctggcggcggcagaaacggcgcgttatatcgttcacggcactaaaggcagctatattaaatacggtctggatccgcaggaagatcgcctgaaagccggtgaacgcctacctcaaaccgattggggctatgacatgcgtgacggagtcgtgacattgtcacaaaatggcgtattggtggaacagcctttgctgacgcagccgggtaattatccagcttattatgctggcattcgcgatgccattttgggtgtaggcgagaatcccgtccctgcaaccgaggcgattaccgtaatggaattgatcgaactggggctggaatcaaataaacataagcaagcgttgccggttaatccccgttagcactaaccattaatacaggctatgagtaatagctttcctgcacttttgataattacgtctatcgtttaggtctattattgatggtttcctctgattgatattttttattaatcggaggcattttgattgaaggaatacagtggcatgtcttggttgcaacgcttacgtattgatacgtttttactggtattaattggggtggtgatcatcgcctcttttttcccctgtgaaggggaaaccaaagtgtggtttgaacgattgaccaccgcggccattgcgctgctgttttttatgcacggagctaaattatcccgcgcggcaatagtggccggcatggggcactggaagctgcatctggtggtattcctcagcacttttgcgctatttccgctgttagggctgggaatgaacgtgttggtgccgggaattctaacgccaacgctgtatttgggattcctgtatcctgtgcgccttgcctgccacggtacaatcggcgattgcttatacctcggttgcaggtggaaacgtggcggcggcgatttgtagcgcctcggcgtccagtattctcggcgttttcttgtcaccgttgctggtgggcgcgctgatgcaaactcagggcggcagtacagataccttgcacgccattggttctatcatcatgcaattgatggtgccgtttatcgtcggccatttgtcccgcccactgatcgccaaatgggtcgagcgccataaaaaactggtcaatataactgaccggtcatcgattctgctggtggtttatgtggctttcagcgaagcggtggtggaaggtatctggcatcaaatcgacggctggtcgctgctggcgattctggtgtgttcgctggtgctgctggctatcgttattgtagcgaatacgctggctgcgcgttggctaggctttaataccgccgatgaaattaccattgtgttctgcggctcgaagaaaagtctggccaacgggattcccatggccaatgtactgttcccggcttccgtggtcggcgtaatggtattgccgttgatgatattccatcaggtgcaattgatggtgtgcgcggtgctggcacagcgttacgctcgtcgagtggcgcgtgagcgggatgcgagcgaaaaacgggagcagggcgaagcctgagttcactcatttatccactgatttaaatcataaaaaagggtcagatcatttccggcccttttttttattttatcgttttcacctgatgcgggtttaccgagctacacaggcaaagccgttaaccacgaattttatcgcgcagcgcctgcttttccgcttcactgataaaggccatcgtcaggccgttttcctgagcctgacgaatttcatcacgagtcaggcccgctgcaggagctgctacgtggtactcattggtaatttcaatcccctgaaccgccggatcgtcggtattgatggaagccaacacgccgtgacgcaggaaggtcgctaacggatgtttggctaaggaaaccacggtactggtctgaatattggaggtcaggcaggactcgataccgatattgttttctgccagataatccagcaggcgggagtcatcgatagctttgacgccgtgaccgatacgttccgcgcccagttcgtgaattgcctgccaaatgctttccggaccagcggcttcaccggcatgaacggtaatgcgcaaacccgcatcccgcgcacggttgaaatggttgaggaacagcccgccggggaagccccgttcatcaccggccaaatccagcgcggtaatgccgtcacggtgagccagcagggcatccagttcttgcaggcaggcctgctcgccaaaagtccggctcagaataccgatcagacgaatatcaatgtcgcgatcgcggcagccagcctgaatcccatcaatgaccgcttcaaccacaccggcaacgggcagttggtgtttcatcgccatgtaataaggggaaaaacgcagctcggcatagtgcagaccggcgttaaccgcgtcctctacgttttcatacgctacgcggcggcaggcatctaaatcgcccagtaccgccacgccccaatccagtttttgcaggaagcttatcaggtccggttcggttttggtgatttgcacatgagggcgcagcgcttctaactcattggccggtaacgtcatattgaactgacgccccagatccagaatggtttgggcgcgaatattgccatcgagatggcggtgaatgtctgtcagaggaaggcgggaatcgatcatggatgcactcacttatatttatgaatgatatttattctgggtaaagtgcagaacagtataaaaacaaatggatgaaaacatccagtgagttgcagaaaaaagagattcagatcacacttaataagccgttttttaataaattcgttgattgacggcccaaataaggcatatgacagtgaaaaacacaccctgcgttaagcagggtgtgaggatgggggaaggtttacgatatatcagcagaaactagcgaagcctaatgattaccgatgacagcgttcaaaccatttatcagtttatccattccgatttccaccttactgcgggcgcaaccgacgttaagccgtaggaagccgcggccttcttcgccgtaggtaaagcccggcattatcgccactttttcctgctcaatcagtacttcctgcaattggcggtcgtcgatatgcaacgggcgtaaatcaatccacgccagataggtagcctgcggcggttgccagttaagctgcggaaaggcctgatttaaccgttccgcgacgtattgcaggttggcctgtaaataggcgcgcagctcatccagccagggcgcgccctgacggtaagcggcaatatgtgccaccagcgccagcaccgccggggaagacaaaccgtcgcgacttttcagcatgttgctgtaggtttcgcgggtttcactgtcgctgataaagccgtaagcgccggttaacgcgggaatattgaaggtttttgaacccgatgtcagcagcgcccaaggagattgagccacctgactccacggcgtatggggctgttctccccaggtcatatccatatgaatttcgtcgctaatgaccttaacctggtggcgttcacacagttcggccatgtgcgccagttcttgcaggctccacactttaccggttggattatgcgggctacacagcagcaggattttggtttgtgggcgcgccagcagtgcttccagatgagccatatcacagtgccagtgattatccactttatgcagtgggcaagataataactgacgctgattgcccaaaatcaccttataaaacgcatcataggcgggcgtgtgagtcacaacgtattcacccggcgcagaccagcagcgaatcaattgcgcaaccatataaatgaccgacgggccgtacaccgccgtggcggtgtcgataccgcattgaaaacgtgcctgataccaatggcgaattgccccaagaaaatcttcgtgctgccagcggctataacccagaacgccgtgctccagacgttgggtcagggcttgcagaatcaccggcgcggtagggaaatccatatcggaaatggtaaagggcagcaggtcggcgctgccaaaacggtcggcaatataatcccactgggtacaccaggtaccgtggcgatctaccggcgtggagaaatcaaacatcaggctctcactttttatcgatgagggaaaaaacaaacggggcaccggagcaccccgcagagttgtattatcgagacttattatgctgaggctatgagtgagtctaattcatctttcaccgattgcacctgagggccgataactacctgtaaattatggtcgttcaattggatgacgcccagcgcccgattggctttcaacacctctttgtccaccttgctcatatctttgacggacatacgcagacgagtaatacagttatccagcgaaacgatattctccgcgccgcccagcgcctgcaaaatagcctcgctgttataaccggatttaccgaccacacccggcgtcggtgctttttctacgctggcgctgtcactctcgcgacctggcgttttgatattgaaatgctgaatggcaaaacggaaaatcaggtaataagccacgaaccacaggctggctaccacaggcacccaataccatttggtggcggtaccgtgcagaatgccgaagactacgaaatcaatcaggtttccgtcggtattaccaatagtgacccccagcagtgccattacggtaaagcctagaccggttaacagcgcgtggatcaaatacaggaacggagccacaaacaggaataggaattccagcggttcggtcgtgccaccgatcacgcaggcgactacgccggaaatcagcaatcctttaattttatggcgattctctggcttggcgcagtgatacatcgccagcgcagcgcccggtaaacctccgaggaaggcgggcattttaccttgagacaggaagcgagtcgcactttctgagaagccgctagtggttgggcaggaaagctgcgcctggaagatagtcagcgcgccactgacactgtgaccacagacatccatcgtgccgccggcttcagtgaagcgaatcagcgccaccagtatatggtgcaggccgaaaggcagtaacaggcgttcgccgctgccgaagatcatcgggccaaaaatccccgcgccgttaatcaagcggcccaaaccgttaatgcccgcggcaaaccacggccaaatgaggggaatcaataaaccgaccagccccagtaccacggtggtaacaataggaacaaaacgggtgccgccgaagaaggccaacgcatccggcaggcgaatggtattaaaacgctcgtgcagcaggtaaacgatgatccccacgatcaccgcgcccaaaataccggtatcaatcgactgaatgcctaaaatattttggatattgtgggttttcagcaccaaggggtcggtagtcggcaatacgccgctggtggtgagatagaagttggtcgccagattcagcaccgcaaaaccgacgaaaccggcaaaggcagcaacacctttgttttcccgcgccatacctaagggaatggcaatggcaaacatcactggcaggaagctaaaggcaaaggagccaactttgctcatccaagtgaataacagctggaaagccgggtggcctaacaccggcaaaagggtaataacgtctttgctgcttaacgaactcccaatgcccagcataatgccgcagaaggacagcaaggcgaccggcaacatgaaggttttccccagactctggaaaaactcccatagcgtaattttttgtttttttaccgccgacataggtggctcctggtgtgtgaaaaaggatctgttctgtggatctttagcgtcctgaggttaaattaagataaaacgtttaacctaaataatatgcgcggcaaatcacagttattgtggcctttaacgccggtaaatgaaattctgtgagatacgcccgaaaatgccattttgtcgatagaaactcactttagctcaagctaatgataagccgagggtgaagtttccagccataacaggcacgctgatgtttaggctcaggcaggtcttcccggcttttggggcgcaggcctggacgggtgccgccagtaggtggatgagaggttaaaatcgctatgtagcgcacagatactgattaaaacgattaatcgttttacccagattattgaattgggtgtaacatttgccccgaagcatagatttgtctgccaaaggacgtgagacaaaaatgataccgaatagccgcgatgaatcataaaaagatcaccattaccgatgttgccaaacacgccggagtttctgttgccacggtctcgctggccgtcagcggcaaaggtcgtatttcaccgacaaccgccgagcgggtgaatcaggccatcgaacagttaggttatgtgcgtaatcggcaggcggctcagctgcgcggggggcattccggggtgattgggttgattgtgcgcgatatcggcgatcctttttatgcggcgatgacggcaggactcagcgaagctattgaagccgaggggaaagtgctgtttctcactcaaagcggcaaagaagggaaaggtctacagcgctgctttgattccctgatagaacagggggttgacgggctggttcttggcggcggcgcgaatcaggaaagtggcctgaaagagaaggccgagcaacagggcatcccgttgatttgtgccgcgcgtgccaacgtattggacggcgtcgacgtggttcgcccggataatatgcaggcggccaaaatggcgacggaactgctgataggcagaggacatcgtaaaattgcttatttgggcggtcacggtcattcattgacgcgggcagaacgattgggcggattttgtgccacgctggtgcagtacggtctgccgtttcgttcggattgggtgattgaatgtgatagtcagcagcaagccgcggctgatgcggcggaaagtttgcttagccatcatcccaacgttagcgcgattatttgtcatcaggcttccgtggcgctcggtgcttattttggcattctgcgcaccggcagaggaattggcagcgctggggtggatacttatctcgatcagcaggtggcattgatcggttttggcgacgtacccgaagcagaattaacagagccgccgctcacttttattaccagctcggcgcgagaaattggctatagcgccggccagcggttattgcagcgtattgccggtgtcgatttgcaattgcaaaacgttattctcccgccggtgcttattcgtcgtggctcggtgtagccggcacgattggcgctattggcacgtaacaatccatttatccttctgttccagattcgctataaacatcgcaataatcctattcaatagtcgacgataatcgtccgatcaaacagagacaccgatccctgtctcaattctgactgcctactgatgatttagatatttggttcatttttgaaagtaaaatttagcattaacagctctaatgaatctgcgtgtattattctttaaatctatagttccaatccgttttacaaaaaagtgccggatgcatttttcgatttttattaaatcaaggaggggatatgccaattattagttctccaacgttgcgccgctatttaaatttaaatttggcgactaaagaattaaaaacgctggaaaaaacgaacctgctgaaggtttcaaatgtagtaatgacatgtttgaccagtacgtcgagcagcacaaaaaatataaataaaatcaacagaataaatagcatcatagcaaagataaacgatgtcagatatctcgccgtcgtagataaacgccgtaatgaagtcagtgaagagttatccgatttgatgcggatgaaagtgacgctaaacagattaaaattcatagaacaggaaaaggctgccgcggcagtggaagccagtaaaatagccgccaaagtgagtgaggccaatcatcgtcggttaatagaacaaagtcagaaagaacacatcatcaccggtttgctttattccagcaccacaccgccaaatatgaacatcgacccagctccggttacggctgaattgcaaaaactgccgctgaatatattaaagactgcggactctttggggcagtttataacattgaccaacgataatataaccaatcacccacgaatgaacgcgctgaaaggtcaaacgccgcgtggttggaccaatggcaaaacctgggattcagtccccggagttggggctttgggtaaaggggcagaaaatgagtttcatgccgatgaaaccgtggtggcattaacgcaactcgccaatggcagctggaaattagcgacggagcatggttctgccaatctggttttgcatgaatacgcgcatgccattgatcgcagctttggtgaaaaggcaaatatgggagataaaggtcttggtgaggttggcgatagtttgagctgccgtcaaagtttccgcgatatatggcagacggagctggggtcaacctcccaaaccgatagcaattattattattggcaaggcggtagcgacggcggcgcggaagaagcatttgctgaggcctttagcgatctttacggaggaacttcccagcgtccgtggcctaatataaaagcttatattgccgcaaaaatggcatcggttaatccggagaattaatcctgtcggatagagagttatcttcgccgtactgatattgctgtcattttacctcgggcgcagctaaacccacgcttacacatctacatctatcgataatcaggaacgtggccataaaaaatgccagccctgtagcaggggctggcattaatcattatgtttcgatcttggcccaatcagcgtttacctgaggataagcgacttcttgttccgaatcgatattactctgcggcaggggcttcagcagcaggggcttcttcttcctgcggcataccgccaaacataccgaacagaccggcaaattcctgcagcgtcattttctgaccgttcagatcgattttgttatcggcgaagctgaagctgctgctgataacgtcatctttggtcgtggtcagtttgaacatctggcccatcgcggcaacgccctgaacctgctgaacggccattttagcggcttcttcagcgctgtaaccctgcaaacgtgcagcctgagtcgtgaactcggtcgccattggcattgggatggtcagattagcgtcgattttcttgatagcacgagtcaggatttcttcctggctggtgattggcgttgtcactttgcttggatcggccagcacgacgtccagtttcagggcgctttcgcctttgccgtttttccagctcagcggagagatgctgaagctaggatcgcctttcagcaggcttggcagcttggtcagaaccagctcggtcatctgcaactggtaagtttcaggatcgatgttaccggtttgcagaccctgcatagcgatttggttgtaggaggtagcgaagttcttcactgcttcgccgtccagaccggcaaaggtaaagttcagcttaccggaaccaaagtcattaccctgaattttcagggaatccagcgtgtagctcagcttaccgttcaggtttttgtccgactcgcccatctgcgaagttagcgtaaagccatcaagaaccagcgcttctttgccttccacgctcaacagaacctgtttgatcgacagattctggtcgccgatgctgagatcaaacttaccggttttgctgtcgttcttcaggctaaggcctttaacagtaaaggtttctacctgatccatttcgtttttcttgaacagcacgatgctatcgctttcgccgttcagtttaacgtcacgcatatctttagagaaagcagcgtcaaggctggcaccggagaagttcaggttcaggccgtctttctcgtaggtgatagggatcagtttgatcgcagaatcggtgctaccgttataaccaatgcgtgaatcagcggtaaacggtgatttgcctttggtgatatcaaacaaagctttaaccgcagccgtgttttccagttcggagtgaaccgacgccatgctagggatcaggttgaatttcttcaattgagccattgggaaaggaccgtgatcgatagtttcgataaaggcgatctcttcacctggcttcatcactgcattttcgccggtgatagtcccgtctggttgcaggatataacggactttactgctgaaggttccgcggtggtaatcggtataagccagtttcagaccggcctgtggcgccagtcgtttaatttgtgaattggcgttatcgacgatttcactcatccgctgttccatcaatttgccggtgtaccaagaggcacctgtccatgcagcgccgagaacgacaataacgctgacagccactaacgattttttcatggttctgttcatccttttctaattcagcaaattcaatacgttgaacgcggttgtaggcacaataacgcccataagcgcgttattgtgaatgcaatagctactgattggcaacaaataagaaagatttgtaacaccaattagttaaataatgttgtaaacccgcgcaatatgaccagaaccgcggaggttaataggggattcattggcggaaacaaagcaggattccccaggttgtagcacaatctgctgtgagtctttttgcacaatactctgtccgtcgatacaaaagataatcgccgcgctgttctgctcgatgttttccgactcgtccgtcaggcgatgaatggcaaaggcaaaatcatccacagggatcgggaagatcagcgcgttaccctgttccttcggcgcggtcagtaactccgactccggcttgggaacaaatttcacgttagcaactaactcgggaatatcgatgaatttcggcgttaacccggcgcgtagtacgttatccgagttagccatcacttccagacccacgccgtccagataggcgtgcggcgtttctgcatacaggaacatggcttcacccggctgtagagtaataacgttcagcagaaggggggagaacaagccgctatcctcagggtagatttgcgcaatgtgacgaatagtatcccacggttcgcctcgctgattattcaacgcggatttcaatacgcccagcgctaacgctttttgctcgccttccatacttaacaggctggcaaacagcagcgccagatgttcggcatccggctgaagcaggaaggcgccgatatccggatgcgccgcagacactggctgcaatagcccaactaactgctctggcgtgcggaaaccattcatagcgtggaagggcgtcagtgcataaaccagctccggtttatggttggcatctttgtaattacgctcggcggcgtctaaaggaataccggcggcattttcacgggcataaccgatttccgccgcctgtttactaggatgaacctgaatagacagtggctgagccgcacagagtactttgaacaggaaaggtagctcgccaaaacgtttagcgactgcatcccctaaatggcccgacgggtcgctgtcgataagctggcgcagtgattgtggctgcccctgagcatcgactatttttgaactgcttttaggatgcgcgcccatccacaattccgccatcgggatatgttgcggattaggaatgccataaagacgggtcagggcgtcggtactgccccaagcgtagttttgtactgcattgatcatcttttgcatgattgaggtctgctgtctcagcggctgaaaggaattcaggccagattaaaaatataagctagtaaacaatgaggttagatgggttgcaaggattgcacaccgggaattatgctttttgccgtaaatttgcgcgacgatcccattgggaaggatagcaaggatgggaagtcatctgtgttcttggcgctgatattttggtcgttttagcggctaaaaactgcggtataaaaagaaggtttcccaacaatcgataacttggatagatactttggcaatgaaacttgttaaagaaaatatagattcatgaaccccagcgtattaccgccaaactgctggtgggcaataggcaataggcggtgagcggaaaatcggccgtttacaaaaaatcaacataaaagttatctcccaaacctacaataaaggcgtcccggtcgcataatcagaatgattgttatggcatgataatcattatcatcagcaactattattgctgatgttcgatacctacttattccgctatctgtgctaaggagagagtcatggcagccactcgcattgaaaaagactcaatggggccaatagaagtacccgccgaccacctgtggggggcacaaacgcagcgttcactggagcatttccgtatctcccaggagaaaatgccgaccgcgcttatccatgcgttggcgctgaccaaacgcgctgccgctaaagtgaatatggatttaggactgctggctgaagagcggggcgtcgccattattcaggccgccgatgaagttctggcggataagcaccctgatgaattccctctctccatttggcaaaccggttctggcactcagaccaatatgaatatgaatgaagtgttggctaatcgtgctagcgaaattttgggtggagccagggggaatgcgcgactggttcatcctaatgatgatgtgaataaaagccaaagttccaatgatgtcttcccgacggcgatgcatgtcgcggcggtactttcgctgcgtgaacatctgttaccggagctgaaagtattacaaaaaacgctagcggataaggccgaagcttataaaagcatcgtaaagattggtcgcacccatctacaagacgccacgcctctcacattggggcaggaaatttccggttgggcggcgatgctaaactacagtctgcatcatatcgaagcctcgattccccatatctgtgaactggcgctagggggaacggcggtagggactggcttgaacacccatccggaatatgcagtgcgtgtggctcaggagctggcaaatctgacccaacaaccttttgtcaccgcgccgaataagttcgaagcgctggcgacctgtgacgcactggttcatggacacggtgcgctgaaaggtctggcggcctctctgatgaaaattgccaatgatgtgcgttggctttcttccggacctcgttgtggtattggcgaaattgctattccggaaaacgaacccggcagctctatcatgccgggtaaggtgaatccgacccaatgtgaagccatgactatgctgtgtgctcaggtgatggggaatgatgttgcagtgaatattggtggcgcgtccggtaactttgagctgaatgtgttccgaccaatggttattcataactatctacagtcaattcgtttgctggctgacggtatgcgtggctttaatgagcattgtgccgtcggtatcgaaccgaatcgggatcgtattactcaacttctgaatgaatcactcatgttggttacggcgctgaatacccatatcggctacgacaaagcggccgagattgccaagaaggcgcataaagaggggctgacccttaaagcggcggcgttgaaactggggtatctgacggatcaacaattcgatgaatgggtaaggccagaagagatggtaggaagtatgaaggattagctcttccttaagctaaggatataagaagtaatgataaaagcgttggcggtgggaaagctgacgcttttcagttttagatgaccgcggttggtttaaggcagggttccggtcaaattccaaatagtcccgctatccatactttggttcaatacggaaacggaggcattcactgcgcctttttgattgataggatcggtgatcgtttgaactgaatgcgcgatcatggcagcagccaccgtgccggttcctatttgaacttgaatattggcatctcctgccgccgtccttccttgcatgtcgagacgggcactgcccacagtatgtaaagtcccagggccacggccaaggtcggcataatcaagcataaggataactgcctgacaatcttttcgttgtgcggaggtagggttaacaattccgcgaataggattttgagtatttgtcttagttaatggcatagtataccttccaattctattaggattatggcattgcgctgtgaaacgctgtgaaaatataaataatatcgagctctattaacccggaattataaatatgcctgattctggttataaaaataaaaaaaacacgaaagatttagctgcttaaataaattaagagtgaacattgtgttaatttgtttcttatgtgattattcaatcggctatattgtttcttgcgaatatttaaaatatcgtgtgacagactggattggttagcctgctactattttatctttaagaatcaaactaaaatcatttttatcacacaattaattatctatattctgtgtgatgagtattaatcatagcaataaacaataagactgccagagagtaagcgatatttttttcatcgcatcattgcgcgtaactaaatgatttaagttacggctgtttttggataatgggaaaataacccattgttttttataagcggaaaatccgctgagtcattcgatatctgtataaagatgcagtcgtggaattaacaaccgcaacggtttagcctgcggtttatgtttgtgtttaatctgtgtggcatcgtaattgggtagctctccaattttaggcataccggcacctaactctttttggcataaagcaattaacggcataggacagggatgctgcacctgcttttgctgttcctgataccagacacgggcaatgggctgaaccttgacagggcgtttaattttcaattttgcagtttcgggtaatctttgcacgtcggcaatttcttgacttacccattcggcccattcttctttggtaaagggcggcacggcgcgaccggcattcaggctcttatttagctgcgccagcaaatcttctttggttatatttttaattatattcttatttgcccagccgaatcgcactgaacttggattaatcaatggggtgagggtgcggtaagtatttagcgtaatcaggccgtgcaggtgagtgtgaacgaattcaaagcgttgctcgctgggcaggccggactcaacggtaataatctgctctaactggtgtttcaattgattaatatgttcaatcagggtgatgcagtcccgatattctgtcttattcaatgcgaaacacagtacgccggggaggcgaacggccgctttgctgctgacattttgcttattatgatgaataaacaggcgacggaagtgctgtaaacccaattcgcgggcttcttctccgactactggcgtgacgttaatctgttcaatctcttcatgctccaagcctttttcgatatcgggcagggtgaagacttgggcggccaataatggaaactctgccagctgctggtggagcgacgccaatgataattccagttggttaaaactggtattcattctcaaaatcaaatcgtacttatccatagagttatctcgttaaaaacacgctttagttacaacatacattaagcttcttgcaaacaacagtgcgcattcaagcaaaagtgcaaaaacattaaggacagagctaaattcttcatgcagaacgaaggggggccgtgggcagaattatgattttactaaacggttatattaattttttcataaggttagctttatgctggccgattagtgtagcagaatacgtgggggactatcgggcgaatatgtctgacttttcgatatgaacggcttatcggtatttctggatgctcgctattttttgatcgaactgatgttgattatttattccctagaaaataatcccttagatgtgaatctgggtaagcaggctctggttaacgcccagagccacgaagataaatattcaacagttaaatacgcgcagcttcaggtaacacacgtaaacgttggccgacggccaacgcaataagcaacagcagcgcgataaacccggtaacgccgtaccagcccaaattcagccagaatatgcctcccaaggtgcccgcgacgctggaaccggcgtaatagcagaataaatacaaagaagaagcctgcgctttggcgcgtctggcgcggcggccaatccaactgctggcaaccgagtgtgctgcaaagaaaccggcggtaaatatcatcatcccaatcaatatggcgataaccgatgaaaatgcagtaatcagcacgccacccagcatcaggccaattgaccagagcaatactggcccacgtcccaaacgcgtggtcagggcgccggctttaggggaactgtaggaaccagtgagataaacaacggacagcaggcctaccagcgcctgactcatcccatagggttcccccaataggcgatagccgatgtagttaaacaaggtgacgaaactgcccatgatcaggaaaccctcggcaaacagcagcggcagaccggaatcgcgccagtgcagtttgaagttaatcgccagcgttctggggcgtagcgaagtggcacgaaagtgtcgggaaggtggcaaaatacgccagaacatgaaagcggcggccaacgcaaacagcccaatcaccgccagcgctacccgccaggaaaagaaatcgcttaatacgccggcaatcaggcgtccgctcattcccccaatcgagttaccgctgatatacaaccccatcgacagcgcgacaaaactgggatgaatctcttcgcttaagtaggtcatggcaaccgccgccacgccgctgagggataaaccaattaatgcgcgcattaataatatgccgtgccagctggtcatcaaggcacataccagggtgcagatcgctgccagcatcaatgacaccaccatgaccggtttgcggccaatcgcgtcggaaagcgggccggtaaacatcaatcctaccgccagcattccggtggcagtggataaagacaagctgctactggcgggggagataccaaaatcttgcgacagcaaaggcaaaataggttgcacacaatacagtaaggcgaatgtcgccagtccggcggagaaaaaagccagcgtgacgcgaataaactgcggtgtgccgcgttggatataaggacgtttattaatcggtaaagtcgaggtgtggcgggcagaggcagtattatcattagctaccggtgtcggcgctacagaattcgcagagcgcaaagaggtgttcactttcattccttatccaaaaaaccacactaaaacaggctgtttgccccatagaaagggggaacacagtgatcataggaatagcgcagttttttgtctaatatattaataattgggaataagacgtttaacctattaatggattttcatgccaatcgaactcagacacttacgctattttattgcggtcgctgaagaactgcacttcggacgggcggcggagcgacttcggatttcgcaaccgccgttaagccagcagattcagattttggaagagcaaataggcgcccggttgttagctcggaataaccgtaacgtcagcctgacgcaggccggagagctatttctcaaagaggcttaccaaattttggcgcaggtcaatagcgcggcggaaaaagcggggcggctgcaccgaggtgagttgggtgagctgaccatcggttttacatcgtccgccccctttatcagcgtggtatcaaaaaatctgagaatatttaggcagttgcatccatgcgtgcatataaaaatgcaggaagtcaataccaaacagcagattgaaccgttgcttgatgggcgtctggatctgggcgtgatgcgcaatacgcgtttgcccgatgcgctgcagcatcgtttactgctacgggaacctttggtcgcggtagtccacgaggaacacccgttggccgcagtgccattgggaacgctgaaattccatatgctagcgcaggaacctttcgttttttttgctcgtgaggtaggaacggcgctatacgacgaaatcttgaatttgttggcgcgaagcggcatcacgccttacatcacgcaagaggtgggggaagccatgaccatcgttggcctggtgtcttccggcctgggagtttcgatcctgccagcctcctttacgcgggtgaaagtggacggagtgaaatacctgccgctggatgaacctgaggcaacaaccgaggtgtggttggtcaatcatcggcatcgtcccgttactgctcccgccgacgcgttgattcgtttaatgataccggaaacggtggcgcaatctgtttgaataaacgccttaaagggtgatatatactgggaatgtgtgcagtaaatcacataactaatcaaatagttgacgccttataccaaaagccccaacatagccgttaatatttatttagaagcgcgaaaatactcggtaagtggcaaagaaggagccggttttgtgattatggatggacagcctgggcatattgatcaaatcaagcagaccaatgccggggcggtatatcgcctgatcgaccattttggcccaatctcccgcatcgaactctcgaaacgcgcgcagctggcgcccgccagtattaccaaaattgtgcgggaactggttgaagctcacctggtaaaagaaaccgaatttcaggatgtcggcagccgtgggcgtccggctatcgggctagtgttggataccgaggcgtggcactatttgtctggccgcatcaaccacggcagcatcactcttgcgctgcgggatctcagcagtaaactggtggttgaggatttactcccactgccagattcccaccccgaacccttgctaaaccgcattcttaacgaagtagaccaattctttatccgccaccaggagaagctggaacgtctgaccgctatcgcgattaccatgcccggcatgatcgatgcacctgccggtatcgtgcataaaatgccgttttatgatgtggatgagatgcgcctcggccccgaactggaacaacgcaccggtctgccggtattccttcagcatgatatttgtgcctggactatggctgaagccttatacggtgccgccaagggcagccagaatgttattcaagtggtgattgaccataacgtcggcgcaggagtgatcaccggcggcagggtgctccacgctggtaatcgcagcgtagtcgaaatcggccatactcaggttgatccttatggtaagcgctgttattgcggtaatcatggttgtctggaaaccgttgccagcattgaaaatatgctggaaatcgcccaacagcggctcaatgtctctatgagttcgttgctacacagttctccacttacggtggaatcgctatgtcacgccgcaatggcaggcgatcagttagccaaagatattattctgggcgtgggtcatagcgtgggtcggattctggccattatggtcaatttatttaatccggagaaaatattagtcggctcgccgcttaatctggcgtcttctattttacatccagcaattgaatcctgtattcgccagcaggcattgccggcttacagcgaaaatattcaggtagagtccacccgattttataatcggggaacgatgcccggagcagcattggttaaagaggcgttatataacggctcattattagtgaaattgctacagggttaatccactgctgctaataacttagagttaattattaataggtattaaatactcttttctccgctaatgactctcgcgccatccgctcgttagctaaaaaaacattccagtccggcaaaacattgcgctaacgcaagctgtttatcttcatcatcgcctagacttttcagctcatcgacaatttcgccaaggttcggcgggactattttgagttaaaacggcaaaattgcggagtaattcctttatgttaacgcgcgtatttgttactggaacggataccgccgtgggtaagacggtggtgtctcgggctttactgcaaactttcagtcagcacggtaaaaatgctgcgggatataagccggttgccaccgaaagcaaagaaacaccggacgggctgcgtaacgcagatgccttggtgttgcaggcttcatcatccattgcgctagattattcggctgtgaatcctttcccgctacatgaggaagtgatccatgccagcactgacaccctgatcgactatgatcggatgagcgccgggttagccgcgttagagcaacaggctgatagcgtagttgtggaaggctgtggcggctggagcgtgttgatgaacgatcaacgcttttattccgaatgggtggttaaagaaaaattaccggttattttggtggtaggaattaaattaggctgtatcaatcatgccatattaactgctcaggcaataatcaacgatgggttacctttattaggctgggtcgctaataggattaacccgggtttagcgcactatgcagaaactattgatgtattacgccaccagatacctgcgccacaattaggtgaattgccttatttacctcggccggaacagcgcgatctggttaaatatctggatttatctccgctgattaaagagtgaataagttataatttttgcctcatatctcttttattttatatccgattttggcggttatatttcccgctaaatcggcggcttatcccgaatggtaaaccgataatggtcttatccaacgggcaattgccgttgcgatcacgcaagataataataagcccggcaagagcgtgtattcgcccgtcatttcacacaccatcagagccgccataatcggcgcatgagtggtggctgccagcagtgtggccatgccggtcagcgccataagcagggcgacatgttcacctaaagatggccataaggcgaaaatctgcccgatcaacatccccaaggctgccccgacaaataacgtcggggtaaacacccctccaggcgcaccagaaccgctactggctaataccgcaattaatttacagatcagaactccgccaatcagcaatattcccggtggtacggccagcatcgattgcaccacgctataaccatttccccatacttcagggaatattagcgacagcaaaccaacgataattcctcccagccccaactgaagcggaagggataaattcagggaacgaaaaacatgaccgctggcggtcatggctttcaaaaatagtggcccgctaaatccagcaatcacacccaatgtggccatcagcagatattgcatcggtaacggagaaggaagcgcctgcacctgatataacggtgcctgttcgcctaagagtatattagttgttaacagcgccgtcactgcggcaataatcacggggcctagcgaagccagcattaaagtgccaaacagaatttcggcaataaacaggctacccgctagcggagcgtgataagcactggccataccggcggccgcgccgcaggcgacccaaagcttccactcgttagctttggcatagcgttgggcaaaaaccgatgcaaacagcgccgccagcagcaccatggcaccttcgcgaccgatggcgctaccgctggataccaccaagagagaagcgaaagacttaaccaaactggcagagatatcgagccgaccatcgccaatctcgatcgcctccatataatcggtaggggctgtgggccgttgatggcgatagcgctggaataaccacaacacaccacctgccgccactccacccagcgccggtgttaacgcccgccgccagccagaaatcgaggaggcagcggccaccaaactgccatcggtacgggcaaatagcagccactctaaccccaacatgccgcggtggaacagccagacaatcaccgccgaagtcatccccagcatgattgcaatcagcaaccgccgtaacatggcgcgataaaaatgatgatggagtggctttttcatgcgtcgcgagttaactgattgaattcagaccaccattgttacttggccggatgtgaatggctagtgaatatttagcttggatcaaaacggagaaaaatgcaggcagttttcgttaaagaagaacaatggaagtaaaaaggaaagatttaacaagctagaagctcccgccagaggctggccgcaaggcgggagcaaaggcgattaagcgttatttttcagatgtcagcgtgaaatagctagtcatcaaattacgataatcaggaatgtggttggagaacagcgcgcccagaccttctacgtcattgcgccagtcgcggtgcaattcgcaggctgcgccaaaccatgtcatcagctgagcaccggcggcagacatacgatcccatgcggcatcgcgagttaacggattgaaggtgccggaagcatcggtaatcacgaacacatcaaagccttcttctaacgcggacagcgctgggaaagccacgcaaacctcggttaccacaccggcgataatcagctgttttttaccggtggctttaatcgctttaacgaaatcttcgttgtcccaggcgttaatttgtcctgggcgagcaatataaggcgcgtccgggaacagggcttttagctcaggaaccagcgggccattaggaccggtttcaaaactggtcgtcagaatggtcggtaagttaaaatacttagccatatcggccaatgccaacacgttatttttaaacttatccggatcgatgtcccgcaccagagacaacaaacccgcctgatgatctaccagcagcacggctgcattgtctttatcgagacgtacatatggtttgttcatttctcactccattgtttactacctgaatggccgttggttgatataaaccaacccaacagcgtgtaatcagcggctaattccgctgagcaactgtgtaataaagtatagataaagttccaataagtgataagtagctcaaattaagccacagtgttccataaacggaacaatgagcttagcgcgaaggaagagggaaccttattggcgaacggaggaatagtgcgcttcagaccggatcacaacgaggaattttggaatggagaaaacgtaaattgagaaaccgtaaaaatagaaaagggcgcaacccgtgcgccctgatgaatatagcttaacgaaactattcgccgctggtaatccgggtataaacaatcttttgcgtatcgttttcgcagtgcccaacaacttggccgccggctttttcaacctgatcgttaggtacgatttccagcgtaaaacccgactccggtacaccgttattgataatcttttgcgcaatatccgctttcacgctttcgcaagatgcctgtgcggccaaaggcgcaaccgccagtaacaatgtgccgataataagcgtttttttcatcagtaaatccttatttgggatgaattgctagtgtcgctaatagtagttcagacagcctgaacttcaagtaaaaagcaccgttcttagctattaaggattaatcttatggccgctttgacgatctaaacaacgctgggtattcggttcccaataggcattgaaattagagctgctcaagcatttatctttagcatcttcagcaacgtcgtatttgtcgaaatctttctctttacgcgtattaaccttattacgtaggcggcgggtttcatcccactgttctttgctttgacgggcggcttctttcgccaaagggtcattggcattattgccgccaacggtaacgcaggtgcttccttgcgaacaatgacttaattgcgcctgcgccatagaggaccaggataaaggcagcatcaataccgcagcaggcaacagaacgcgcaatgcgatacgcaggcgattgtttttcatcattaaatccttctttatcgatgagttaagcgactcattttgtttaagcatacaaacctatagataaactatatcattgctctgtgacgatgtacccactaccgcaaactcatttaacctttagagagaaaactcgtcgttatgttgaagacttcattacttttttttgccaccgcactcgcggagattataggctgtttcctgccttacctctggttgaggaaaggggcaccggcctggctgctattaccggctgcggcgagtttaggcctgttcgtctggttattaacgctacatccggcagcaagtgggcgagtgtatgccgcctacggcggggtttacgtggctacagccttaatctggctgcgagtggtggagggtataaagctatcaatgtttgactggttaggtgcaggtattgcgttgattggtatgctgattatcgtggctggttggcgggtcaattagcggaaatcagtgaaagtaatgagtaaaaatagagcacagtgacttcactgcgctcgatctgacaccgcgtattatgattctcgatgaatgttcaacccagcgaatgattggctaaccggcatcatttctaacgtattaatattgacgtgagcgggcagagtcgctacccaatagaccgcttcggcaatatcacctggcatcaatgggttagctccatcataggttttattcaccttttcatcatcccctttgaagcgaacggaggaaaactcggttcctccgaccaatccgggttcaatatcggtcacgcgaatacgcgttccgtgtaaatccgcacgcagccctaggctgaattgcttcacaaaggctttagtagcgccatatacgttgccaccggcatatggccagtttgccgcggtcgagccaatattaatcacgtggccaatattacggctgaccatttctggtagcaacgcgcgagtcatattcaccaaacccttggtattggtatcgatcatggtttcccaatcatcggcattggctttgtgcgcgggctccaaacctaatgccaaaccggcgttattcaccagcacatcgatatttcgcagtgatgcaggtaattcgtcaatagcctgttgaatggcggcgcgattgcgtacgtccaaccgcaaaatatgcagggcctcacctaattcgttcttcagttgctccagtttttctaaacgtcgcccgctggcaataacctgatggccgtggctaacaaatttacgggcaatggcttcgccaaaaccggaggttgcacctgtgacaaaaacgatcatattccgttccttaccaataaagtggggcgataactgattttatatcattagcatactcggataatttttatcacgatataattaccattacttggaaagaatccgaactgaatagggtggtcatggttaaatcgtgaccgaatacaccgatgtgcgtcattttcttcggttactttaccggaggcaacttcatcacggtgaagcaaaaaggaaactaacagacagggagagaaaataccggggagctatattcctctttgattcgctacagcctctatcccgagcagattaagacattatagcgttacaagagagtctcactaaaaattaccgattgtgcttatctcaggtaaacattaatcgtgacgcattcatatggtcactgataatggaacgataaaattctggtgccaatatgaatggcaccagaaaagttcgagcataagctattatttaaagttatggttaatttaactttataattctgagtttcgctttgtagtgctgtgagtaataaatttatatagggatattattttttttggttgttatcgcagcttgtgtaaaaatgaaacacctcacattataattcagatgggaaatactttttaactaaggcggaaaggactgcgagcgtttcttcatccattttaccgtcatagcactctgggcgaaaatgtagttggaaagctcgaattaaaatctcataacctatgttagtatcagcactactggtatcataaccataaatattaaataattttagaatttcatctttatccggcatggagtgattatactggcataaatattcattttttgtttcatcatcataccaggctccgacgccacacatatacagttcaaaccacgggaaggcagccccgggatcacttttacgccccaaggaaatatctgaatgagccaatacatgggtgggggatatatccggataacgttgtaagatgttaagcgctaaatcttttacggcttcaatttgctcatcattatagggtgggaaagtaaaattaccattattatcagatgcctggttaacaatctcaatgccaatcgaactgtcattcagattggttcgctggtgccagcgactttcccctgcatgccaggcccgatcattttcatctaccaaattaaatatacgcagctcgtcaaatccggcggctatatagctcggatccataggatctggaattaaataatgcgaactgactaacgggccagttaatgcggtgatcgaaccggtgaaatcaacgacggtatagtggagaatcaaatatctaacgcgtttatcgaatcctttcacagcacggaatgaattataatctatatttattaattgagtgttttccatttaagtactccttgttatttgtgaatgattaaaattattttattcatcttgccgtccattaacaccgattgagatttacattaatttaatttaatcgaacgggcaagtttgattttaaattatggtgcgaacaacgaccgttttatatcactaagtcaatgtcgtattgaatagaatcaatagcatatagagatgacaaaaagtcattcagctcatctgattggtgtgaaacttaaaaatcattaaacatgacatctgaaagttgtgtgttacttatttaatagatttatgaatgggccggggaaactaaaaaaatactggcgcagcatttatcagatacaggatggttcaggattttatttctactaaattgatatcttcgcatcttaaactcgctaaaatgacagagactcatattaatgacattatggatgggatgcttagttataatattcaagtaagaaattattattttaaccgcctgttgaagaaccaataaagagccaatgtagccgctacgacctggaaaaagttatgctggtaaatatgtctgtggccatgctgacgaccttaggttaccccggcgctaattggctggataacgtatctctctgatctgtatgtggcattttttgtggttgtggccgtattcctgattattactttaggtgcctatacattacagtattagattttaactgagtggcaattgtgccttttatcctgattatcttataccgcaaggagtttcaatgagcgtcaaacttatcgcagttgatatggatggcacctttctaaacagcaaaggtcagtataataaatctcgtttcagaaaactgtatcaacagttattgcagcgcggtattaaatttgttgtagccagtggcaaccaatactatcagttgaaaagttttttcgatgatattgacgaccaaatagcttatgtggctgagaatggcggatatatcgttgataaaaaacaggaagtttactgtggaaagctaccttctgcgcaggtggctcaagtgctggaatgcatcagtaccttatcgggaatcaattttctggtatgcggtaaaaagagcgcttatatgctggagactggcgctcccgatttctttaatggaatgcgtacctattatcaccatctcaacacagtctctgattatgcgcagatcgatgacgttatctttaagtttgcccttagttatgaacaagatgacgtaagcgggctgatggatgaaataacacaaaaaataggtgacattgtcacaactgtttctagcggacatggttctgtagacctgataattcccgggaatcataaggctaatggtatcaagcgaatccaaggcatctacggtattgcagataatgaagtcatggcattgggtgatggcggtaacgatctggagatgttaagacacgcaggttacagtttcgctatggaaaacggctcgctggcggcaaaacaagcggcgaaataccgtgctccggcaaataatgaggacggtgtattaaaagtgatcgatgattgcttgaataatcgaccaccatttgatttataccacaaataaatgatgcaactacgtgaaatcagcagggtcatagccgatgatttttctcagatttcacgtagcgcgatcggaaataggcagtggtttgctgctatagccaacaattaatcgatgaacatcccgtgagcatctcgattaaaattaatcttaacgcagtgtcattggtcaatgggtagtcaggtcgttcacattaaaattggttcagaagaactggagtactcgaaggagcaagttgagtgagcgaagcattcaatgagttatcggttagcgggaatacatgtcggtcagtaaaagatataggtaacaaaagaatgaagctgtgaatgaggaatgtttgcgagcttgactaaggatgagtgcattattcagaatcaggttttagttgggataaataaaacccaaaatgagcctggaatgaagagcaacaggaataaacagccaatggataaggattaaggccaaaatcgggaaactcacacacctttacctcggttcgcataatgtatattatgttaaatagaatatgatggttgttaatgagttcatgcaccatatctcggtgtgtttattaagcccttccctttaacagagatgcctcgctaactttgccataacagcgcttgacctccgtccttccgccttattgattaaatacccgccacggataatactgctaaagtaagattctaaaatctcgtggaactggacatgaaaattattatcatagtgcttgtgttgtgtatgagcgcctgtacatcttctaagcatataggtattagcggcggttcgggtgggatttcgggcgttagcatgggcactgttattcggtaatttaccgcgtatgtggttgattatagtgatgacgaataccgcctttcgcggcatgaacggttgtttccctcgtaatatcctcgatgcaatctatggtatagagaataaatgtgaatacagtcaggaaatgtgggacggttatcaatagataccttttttgttaattttattacccgctatgacttaaaaactctcggtttgcagtaccaatcctaacgcagaatatacaggccgttgcagactgacatgatgatcagtctgcatacagctgagcgaagcaaaaccgagagtgaaaatcaaacccgcgcttggttaattaaccacgtaataagataaagtggctttatcgaggtgaatatcacatcgattcttatcctcatgaggcgtttccgctacggtagaaaccagccattgccctttcgccgtaataggtagcgttaatttcccattgctgtccgtctggccttttaaatccacatcttcaaaggcgtaagtgtgcgccaaggcgggatgagacaatgtattatttttttcatgggcgtgatcgtgatgatggtgttcatgaccctgtccctcggcgtcgctgcgttcctccccatcattaaaaataacgccaaaggtgtgattcgccaaaggtttaccgttatacagcagttgtaattccaaatcgtcgccaatcgacagttcattcggattctgtaatgggacaaactctaatcttaatcccatcggttgggtaataaacggattggcatcgggatttttcacaaagctgatggttttaccggacatagtgttatcggtgcaaaaactacctggccattgggttttatcttcttcctgacgccattcgtctttctcccctacgcgcttcactgaccaaatagttggcttataggtagacagagcgatataagagccaggcttcaagttctcctgctggaatttgacgtttttaccgtcgatgttaaaactgtattccttactgccgttggtcaattttagcggggcaaagaaatgcagtctttgagccggaatcgcttccccatgtggaaatccgtgaccataggccatttctaccgttgccgtagtggtgttcgccggaggcatattggtccataaatcatgggcgctgaccgttgaatgtaacaacgaagcgcacaggccaagagaaaaacacagggtatgagttcgattcatttaactactccatatttaatatccaacaatatctggacgttaaggtcagctatcccttcccggccacagaatttgagtgtgataatgtaacaaacttcatttcctacggcgaatgttttgttatgttataacataattatcatcgcggtaattaacgatatctcacaaagtagcgatagtgaacatggccgcataaatgctctgtaatgttctgcatgaagccataacccccctttcccgttgaagaatgatgaattagtgctttcatcaccttttctatcgtatgattgaaatcatatgcatttctaacaacttgattcccccaaatacgacagccgtcgctcacgagctcatttccgcttttcagccacgagctatagataaaatccggtttatagctatttttttataactgttttttataactattttgtttatcacccctaggcttgcaatgactaggtttatagacatgaggcgggaataattaagcctcctgaaaactgccggagagaatcattcagtgagaaattacgatgaaaaaaagtaagacgctgttctggcggcacgctagcgccctgtttggttgggcgttaatctattatgttgcgggtgtggtttcgcaacagtttgattccccggcgtttcaaatatctctggtgtggtttccctccggggtggctgtcgctgcctttttggcggtccgctggggctcgtggccgctgctgttctttattttttcgatggtgagcgttctacttgaacaacactggcgcgaagatgtgctcagtgcgttgttctattccgtcctgtcgttacctgccagcgtggttattgcctggatagtgcggcgttttgctcgccccaatgacgatttgcacgctattttactgtggataagcgcgactcttattatcagcgcgctggatgcattgataaccggtggcggaattgcgttggcggcaggtttaccgctattcagcctgttctgggtcagcctgattgccgacgtgaccggcattctgtttgtgaccatcattattatgggtttcctgaatatcagagtgcgttccgctcgactcacgctaagggcaaagctggcgggagccgttgtttggttactcctttgtgctagcacctggctaatcttttccggaaaactacaggatttcgcggccagcggcgccgcgctgtattttgcgctgtcctgcattcctatcgctatcgctatcgtgctatcgattatagccggtaatcggggcggttcgctggcattgctgacattgggtgccattgtgattttttatacctatcaacaccaaggtccattcttcttacaagggcttcatagcggcgaacccttgctgctcactcagtgttatctgaccgccacggctttattgatggtattcctgcgtggattatctcactcaatacacagtttcaacccagaaaccggtcgtattgaaggagacggggtgatgtaccagctaaacctggaatcgggcgaaatcctgtgggatagcgacattggtgccctattcggtgagcgaggatcgaccgctttcctgcatattgatgctgtattgccgcgcatccatccgcaggacagagaaaaactgaaacaacattggcgggcggcagaaggtcgggagccgcaaggtgctttggcgttgcgcatccggacagccaacggagaatggctttctatcgtggatggcggctgtgtgctgctgaccggtactgaaggtaatcgtgtgatgggtaactggcaaattagccagtacaactagattagcccgtacaaacaagggaaatagaggtatgaaccgttatttaccgcagagatgcctactatgattcaaatcgccctgctgttatttggcgttgattttgtccgctccaaagcccgatttcttggttttcttggcgcagtctggggattaattggcatcgggatttttatcgatggtatcgatggtacgctgtattttcccataaagacctttggcgtgctgctattactggaaagtctggtgacgctcagcgtggccgccagcggcgtaggcgcacaaaaagcagtgctgtattttaaaggcgggttgttttgtttcgtggcgctgctgatcctgtcgaataaaacctacagtaatctgctgctggcgattatcttcggctttgcctatttcattattggtgcgttagtgattgcttccgcctgggtggttcgttatccccgctggaaacaggcaatggccggcggaggctgtcagattctattcgccatgtttatgtttagcccttatcccacgcactatcaggctactgtgtcattctttctgggtgtcctaatgtttatcagcggggtgaataccctactgctggcaaggcgcgccaaccagttgagtgaaggcacttcggtattcgcgctgttggctccttcggatattctgtccggattgaccaaaaagtctgcggcaaaaccgagggcacttccacctgagcatgtggatttcactggaccactgaccgtgcatatctggacgccagaaggtgccgcgagtgccagaaccattccgcgcccagtgatcaatcgctatattgcggcggtggatacacaaggggtgatttccaccggccatgcggcgctggaattatcgccgaaagtgtacatcagtctgtatcccgcagcggatatcgatcgttctccatccgagttcttgcggttgcttaaggctacgcgcgataacgacgttgacgggagttttcagccggattacgccaccgaagcggccaattggtgtgaatcagacagaaaaatattattccatgaatacaacggtccggcgcttttgcgctattgggacgtttatcagcgccagaaaacctataacctgacatcacgtaattgctccagcagcgtagcatacgcgttagaagcgtcattagatggcgtactggccgaacaggggaaacactggcggccagcgttacgaaccttgtttatgcctgaactgtggatcgcagctcaggttcgacgacgagcaataaccatggcctggacgccgggtttagtgatggattatgcccgtgcgctgcgagcgattgtgcatccggtgccacaatcctggtatcagcgaatgccgtggaaatggcgcgtaagcgatgataataaggcgggaacagaaactgataagattttttagacccaatcttgttgattaaaagtgacggcgtcactcattcggtgacgctgtcgtcgcattctgaaagcgtaggtagcgaaagtttaacggaacggaggctcgttaaaggtgcgcaatttacgcgagtgtaattggtcgccctcttcgcgtaacaaatcaatggcgcgaatacctatctgcaagtgttcggaaatcgccccctcataaaaatggttcgcctgaccgggcaatttgatttctccatgcaaaggtttatccgaaacgcacagcaaagtaccgtaaggaacgcggaaacgataaccctgagcggcaatggtcgcactttccatatccacggcgacggcgcggctcaggctaaacctcagcgctgaagcagagaatctcagctcccagttacgatcgtccgaagtgaccaccgtaccggtacgcaaccgctgtttaacctctttccccggcattccgctaaccgctttggtcgcgtcatacagcgcccgctgcacttcggcaatgctgggaatgggaatatccggcggtaatacggcgtccagaacgtggtcatcccgcaaataagcgtgtgccagcacgtaatccccaatcgcctgactttcccgcagtccgccgcagtgtccaatcatcagccaggcatgaggccgcataaccgccaaatggtcacagatcgttttggcattggatggaccgacgccaatattcaccagcgtgattccctgcccgtttttagcgatcaaatggtaggccggcatttgatgttttttccacgccaaatccgaagtggttttttgcggatcggcgttttccgccgtgataaaagtgcctccggcgcaggataatgcctcataagggctactcggatcgagaatctgttcgcaggcccaactgacaaactcatccacgtagcgactgtaattggtaaatagaatataaggctgaatatgttcggctggcgtaccggtgtagtgtttcaaacgcgccagtgaaaaatcggtgcgcagcgcgtcaaagtgagacagcgggaagttctccgtcgcggtatccaatccatcggtaataccgtcgccaatcttggctagatcggtggtgggaaagtgctgcgccaatccggcggtcatggtgcggtctaataccagatctgaaccgtcgatcacaaagggatagggcatatctatttgtgacggcgtcacttcaaaacgtgcgccgtactcaccttccaacagagtcaactgttcggtgagatagcgacggaacaacgctgggcgcgtcaccgtggtgctgtagcagccggttcgggaaaaacgtccataagcgcgggtacgaatattgtcgcggaactggccttcccaactgacgcttagctgaggataggcaaataaacctttggcacgttctgccgcatcgggcagttttccttcgtgcacaaagtcgctgatagcttctcgcaacgcaactaatgccgcactgtacagcgcctcgagtttatccaacgcctccgatgcagtgagatgaacactatcttgcgtttttttcaaaatatctccttaaagcaaagggtaaggcgtttgatttagcttactaatatagtcgtctttaggaaatgattgatatagtgatttagttttatcagaagaacaaacagagccaccttcctgaatcctttcttgtgaaataaacagtatggctctctgcacaaaatggagcattccaagctgactactgccgaaatcatctatagtgttctgtctgctatatggatgacagattttctgaaaatggcctcagtgctgaaggaaccatggtaaataatataaacggccccgatcatactaacaaacaccctatggcgggttttccgcaagtttgttacatcaaaaatacggtaactaatcccaatattattatcggagattatacctattacgatgatcctgataattccgaggattttgagcgcaatgttctgtaccacttcccatttattggagataaattgattattgggaaattttgcgccattgccagaggtgttaagttcattatgaatggtgcaaatcacaagatatcaggcgtctcgacttatcctttccaaatatttggaaacggctgggaaaaagtagccccttctcctgaagatctcccgtttaaaggcaatactgtggtgggcaatgatgtgtggataggatttgaagcgctaattatgccgggagtgaatatcggtaatggcgcgataatcgcgtcccgttctgtcgtaacctcagacgtaccggcctattcgatcgttggcggtaatccagcaaaagtcattcaatatcgttttgctccagacctgattgttaaacttgagcaactagcatggtgggactggccagtagaaaaaatcactcagaatttatcgttaatagtgtcggatgacgtgaatgcgttggtttcaatcatggatatctagctaatgttggcagagctgacctgcggcggtttccccgtggtcagcgagtaagccatatgaaatagctataacggagactatctgcgccaaacggtaattccgactttccgactttatctccctccctccttttattcatgccgaattaatcagcgtcgaacagtttatttattttctctcgattcttaccttatttgtaagaaatcagatagtgccaatcactgccatttgaataataagttcacgcccatatctgatattcaataccattatttattaagtagttacctgtgttatgtcatttgatttggccagtaaagatgtggaatctaggacttcccacaagggagaaaaaaggtagcgccaaatggcttcaaggttataggcgctataaataacaacattacaccctttaaattaagagagaaatatatgacgactaacaattcacaactgagacatggccgaattactactcctaaaactcgcggattagtggcaaccgatttaggattaatcggcgaatgggaaaataatgaaatggaaggcgggaaaaatttccctgacttaaacgcgggtccggttcctgcgccgttccaggcggataatccaagtaatattcctcctaaggatgggttgattctcagcggcggccacgcaggcaaccgtgaatcggtcaactttaccgatcaggaaatgcagcaaaagctgcgagcgctgggcaaagccgatgacagtttcagttggcctaaaattgcggtaaaacctggcgagctgtttgacgtcaaatgggcctacaccgcccctcacaccactcgcggttatcgctggtttattactaaggacggttggaatccgcaggcgcgcatcactcgcgatcagctggaagtggctccgttcagcgaagatttctacccgttcgtgccttattactcacatcaggctaaattggtagcaaaaaccaaccatcaggttcttttacctacaggtaaaaaaggccatcacgttattgtactgctttggatcgtggcgaactctggtaatgctttctatcaggcatttgacgttgatttcggtgcataaaccccatgggtgatgcttgactataattgttatcgcgacgccggtctgcttaggagtaccggcgtttttgccttgtttcccgcttttcttctttaatgtccctcttttgtacactatccctggttcgcccctatcttttcgcgtcaatttattccgtatagcgattgtttttgataaacaaggggtggttttgccacctattcaagcgtttgattggtgttaatgagaattaaagtatccgctgttgcagataacacattattttctgcgttagacatctctcataaagggtcccttttgcgtggcaaaatcatttttacgcagtggaaatttagatgacatgcttgccttgggcgaaaatgggcaaccggtttatgcttcggcactccagcttcgggaagcgttacgcttaagaaaacagcaacatattgctgactgtctggcgattcctcagccaaatgaagacggcgaccgcatggattggtattcccctatatcaggcaaggttacctcctggattgcggccagccatagccagcgcacttcggccataaagcaactggaaatgtgccaggccacggtggcggcgattagccaacgcgctcagcaggcggaaaaaaccggtcataagctattcggcgcgctgttggcaaaagccttccaatttcccgatcagaatcacgtttatttggtagatgacaaaccagtcattaccttctggggtttcgtcaatctggataaaaaatcccgatccgacgctctggattgcctgcgtgccacggtgcatgagccagccgttgagatgatgccagcggctgcgccggttagcccgaaaacagcgtctgccgcgaccataccgccgacgatccccgagccggtgattgccccgccgccaccgccagtagcagaaaaccagccggtgccgccaaaccgctggcgtcgcctgcgtttatggctattgttaccggccgccgccgtgattgcggttttagcgctgcaactgtcagcgaccaagcctgcccccgtagctaagcctgcagtcagcccaaccgtgaccaaaccggccactaaaccggtagaacatcctgcttcaaaacatccagcttcggcagctaaacccgcgcctatcgtggccgccgcccaaccagcggcagacaaacctgcggcagaagtcgaaaaacccgcgccgacaaagacctcagaagcgcggctgccaaacccattgccggtgactcatgcgacagtgatcgctccagtcgtacctgagccacctgtggctgccgcagtagaaaccgttgccgtgccgattccgaaagatgcgttggtattgccagcggacgcggtaaaaatcggctccaccaagtttctgaatggccgctggcgtgtatttgtggatatcaaagatccactgacgggcaaaccaccggtactgaaataccagataaatgatggcaaaggcaccgcccgcatcacctatggtgacaacatcagttgccgggtcaatgttaatgccggtctgatgcaatctggcaatctggtgatcaatagtcgtaccaaggcccgctgtagcgatggttcccgttaccaggttcccgaactggtgtgcaaacaaggcctgaccggccccgctgaatgtaccggccgctatgacgctgaaacccttcttccaatgacgatgaaacgtgagagtaaataaacactatgctggcaacgatcacggattataaacaacgaattacgctgattcagaacagcgggattcaatttttggactttgccttaacgcccgtcgtggatgccgatttgccccatgcctttgtgcgtaaaagcgccaatggcccattattgcgtttgatgtttaatcaagaacgtggcaaatacctgttaccggtggcgggttcagcgcctgaagtggtgaaacctgaattcagtttcccgctggatcagtcacttaagttgctggagaacatctggctgcctttacctttcttacgctttaatccgccgcgtaactttatcggtggcccggataactgggcgcggatgcagattttagcgttggaaaccccggatcaggacggcaatactcaccgtgtctgtttggcgtttgataccaaggtttatcctgaaggtcacgataacgaattcctggcgcccaccgagcatgatattgataccggcacgcattttgcgctggcatatcaaaatgatgaattaggtgaatttctcgatctgacctgggtagacggctggctgcgggaaacttttattcaacaggttagccagcaggaacaacgtaccgagcgcgaaattaaggcctcgctgcgggaatttgaatatcaggcgcactatctcaacctgctggatatgttaggtaagcaattaggcataccggacatcaaaatgaccaccgccacgctgcaagagcccgcggtgaacgtggatctgattctggacgtagggaattcccacacgtgcggcgttctggtggaagatcacggcgacggaatcaacgggttgcagcagtcttacgagctacaactgcgggatctcggccagccacattttttgtataatgaactgtttgaaagccgcgtcgaattttctcaagcggccttcggcaagcagaatttctcggtggaaagtggccgggacgacgcctttgtctggccgtcgatcgcgcgcgtaggccgcgaagccagccgaatggcgctgctgcgtcagggtaccgaaggtgcaaccggtatttccagcccgcgccgctacttatgggatgaagagagtttcactcctggctggcgttttagccgtaccgccaccaaatctcacggagaagcgccggcgatcgccctaccgttgaccaatctgatcaatgacgaaggccagccactctacgctttgccgttggaagaacgtctaccggtattttcccctcattacagtcgcagcgccttgatgactttcatgttgtcggaactgttggcgcaagcgttaatgcaaattaacagcccagcgcagcggcagaaaatgaaccatgccaccgcaccgcgccaattgcgtaatattattctgacgctgccgtcggccatgccgaaaccggagcgcgaaatattccgtcgccggatgcatgaagccattgggctcatctggaaagcgctgggctggcatccgatggacgatgatttcacccgcgctgaagataaagccaaaagccgcgtacctgtgccagacgttcacatggaatgggatgaagccacctgcggacagatggtttatctgtataacgaaactcaggtgaatttcggtggccgcaccgaagccttcttcgccagtatggcgcgtccggataaacagctcgccgcagatgaaacagcagggaaaagtctgcgtattgcgtcgatcgatatcggcggcggcaccaccgatctggcgattactcaatacgttttagatgatggcgttggcagcaacgtaaaaatcaccccgcgcctgctgttccgagaaggatttaaagtcgccggcgacgatattttgctggatgtgattcagctttatgtcttgccagcggtgcaggccgcgctgaaaaaatccggtgtgcctgctcctgacctgctgatgactaaattattcggcaatgatggccgcgccgatgggcaatcgacactgcgtcagcaagtgactttgcagctatttatgccgctggggcgcgccattttacaggcatatgaaggtttcgatccgttagacagcagcgccgagatcgacgctagctttagcgaattgctgattcaggctcccaccgcgcgcgtgctggactatctgaataccgaagtgcagcgtgagctgcgcgccgatgctgagccttttgatattcttcaggttgcgctgatcgttaaactcagcaaactgcacgccgagtttctttccaaccgaatgaacctgacccaaagcctgcgttcgctgtgtgaagtggtgtcgctatacgattgcgacgttttgctgctgaccggccgtccttcccgcttccccggtatcgccgcgctattccgccatttacagccgttgccaacgaaccggattttgtcgctggatggttatcacaccagtgaatggtatccgtttaacaaactgggtcgcattgataatccgaaatccactgccgccgtcggtgccatgctgtgcctattggcgctggatctgcgtctgccgggcttctattttaaagccggtgattttcagccttattccaccgtgcgttatcttggtatgttggacagcaataacaccctaagtacggataatctgtattacagcgatatcgatttggattcaccgtcctaccagttaccggcgaaaggcagtttccccgtgcgcggcgcgctgtgtctggggttccgtcagttggataacgaacgctggcccgcttcgccactctatactctgtcgattactgatacagaattagcgcgaaaagtggctggcgacggagatctgcgggtaagactcgcgctggtgaaaggtgtgcaggataacagtccggaacgattcgaaattgccgaagcgttactcggagacggcagccgcgtgccgctgcaacatttacgactgaaattgaatactctggccggtaatggcaccggcgagacgcattactggatcgacagtgggagcgtatttaaaaaatgaaatctttaacacccgaacagctgtcggccacgctcacccatcagttacaggcggttgtgcaaggcattgatcacagttttggctggattgaaagctgtcgccagcaggctccacgtctggataccgaagctgagcggctaaaaatcaaactgcgccgccataggagtgaggctcagcgtttgtcagttatttcttctgaagcaatgaccatcgggttttttggtcagtctcagcaggggaaatccgcgttgattaccgcgctgaccactaacggcgacaataagctggaaacccgcttaggggataaaacctatgattatctgatgcatatcaatccggataatcaggctaccgcattggcaacccgtttcacccgccagaatgtgccagaagatcgcgcttatccggtacggctctctttgctcaatgaaaccgatttagccaagatgacggccaacatcttcctgcatgattttttacaggaaaaggcactttaccagcctgatgcccactctatcaccgaacatctcaacttattggcgatgcatcgccaaagtcaggccgtgagcggtatcacggaagatgatgtggtgacgctgtgggattatttgctgcgtcaggataaaaacagccagtccctactgaatacgcatttctggcccacggctatcgaactggcgccctgcctgagcgtagacgatcgcgcgcgtttgttctcgctgttatggggcgaaatcccagcgttaacggcagcttatcgtcactttgcgcatactttacagcatcttaacggcgccactgtggtattggcacctttgagcgtattagttgatgacctacagttaccggcgaacggcctgatgaatatgaccacgctggccaacctgaatgcgccgtcggatatttcggttcaggttaggccgctctgtcagggggaaaaacaacgggaagtgacattgtcactatctgagctcacgctactgagcgccgagctatgcatcccgctacactccgccccgcgcgatccggcttttgccaccgttgatatgctagatctgcccaactggggagcccagcttgatacgcctatgttaagcgaatccgaaaatttgccgcgttacccgttggcacagaattttttgcgcgccaaatgtgaatatttgctggatcgctataccgaccatcaggctattaacctgctgatgttatgcagtgccgcgggtcaacgttctgaggtgaaaaaagtcgccaaggcattggattactgggtaaaaaaaaactcagggagaaaatgcgcaggtgcgtgcacgtcgtcatccggggctaatttgggcgctcactcctttcgatcaacgcgtcactcatggccagcattatgacgaagcggtacagcgtcaggttggcaatcccggtgatagctggggctcggtgcaagcgctggatgaacgcggtaccgaacgaatggcgacctatttaatcggagaaatcgcccgaaatattaaaggcgagcgcctgacggagcaactgcatgaattgcaacgggagttgcaggataatctgctcggccactggtatcactccgaaggtgtcagcgatccgcagaaaagacagcgcattgccgaaactttgattaaaaccctgcaaactcgtaccggcgttcacggtgaactgctggagcgtttattacctgccagagaggaactgctgcggttattcctgcaacaatctcacagggttaccaaacaaccgcgagccgatcaaaagatagcccaaaccagtagcgaacccttcagtgtggggattgaaatcgatttatttagcgaattacaggaagatgtcgacacaaacctcgacgttaccccatcattcacgacaaataacgacttcagctatgccaaagaggtataccgctattggatcaaccatctgcgtagtttgccagaaaatggcccattagtggctctgctgggcgtgtcgaagccgacgattgaaatgctgatggaagaactgattaccgccagtattcgtctggatatggaaggtgccctacagcgcaaactggccgatcaggaactgccaggtacaccgcgggaacagttggcagatcaacaagtttcgcgtgcgttaaccgtgctgggtgattttgtcgcctggttgggattcctgcaaattgaaccggcgcagcgtccagacagccggattaatcgcgggcataagatttttgctcagccagaaaaaccggtagcaaactggggcacatcccaacgtttgactcgtttggctctaacgccaaccaataccaccgcgttttatatttatgactggctggttggcctcaatgaactgattatgcaaaacctcggttactcggccggaaaagaattgagcgtggcgcagcgcgatcggttgggtgcgatattgcagttgattaaacctatggcactgtagccagaaaaaggtgcctgcgggttattaaccgtccggttatttttgtctgcgctttcccccttccgcttgcggccttgaatatcagtggccgcaggcggaatatctgtcatcaaccgccaacggctacctttttttccccaggctttttatctcgctgaatgctgttttttaatcagcttaaagccagacaaactttccagcatattttcaatctccggccattccccgtagcccgccgccgtatgaaaatggccaccgcctgattttatcaccctctcactgccccactgactggcaaactgctgcgcgcgatccagcgagagatattcgtcattatcactgcaaatcagcgtgctggggaacggcaacggttttgacggaatggggcgctgcacctgaatagccgccggtgccgtaatggcatccacatcggccggagcgaccaataatgcgccaatcactttgccggaatggtaacgctctgcccactgagtcacggtaatggcaccgcaactgtggcctaccagaaaaatattaccgggaataccgtcgatagcgcgagccagcctctcccgccacgtgtcacgatccggattatcccactctttctgttcaactcgcactgcattgatatatttgcgttcgataaatgactgccagtgttcggggccggaattggtataaccgggaaccagcataaaggtacattgaatcatgggatatcctgcaatcagaaataaaacagatattgagtctcgattataatggaacagtttttagcaacggcgagttcagcatcgctaccggggaaattaccggtgcgtccagcggcacatttttgccgtagcgctctttgattttttgctgcacggccggtgcggtcagattaaactctctcaccttttgcaattgaccaatttctagcccggtggctcgttgatacattttccacaccagttcggaacaatacatccgttcattagaccaatcaaaagtcagatcgtaaggcttgttttggaaggcttttccttgctcatgcagctgcctgacctgcgctgcggtcaatggcgtctttaaccgtttcaccagatactgcccgcgggcaccgcgtttgatccagcgatccagcggtgtgtatcgcaccgtggcaaccgcttcataaacatagggttttccctgcttaaacaacactattcccatatggctatagcgggaaccggtagcaaactgaatggcctgactttgggatgaagtagacgaatggaagataatgtcgccttcctgcggctgataggcaaaagccagcgcgctgaaaaaacagcccaataggacaaacgccaactttatcatcgagatatatccctatcaatgtcgctattaatcacagctgacatcctaacatccttccgtggcagatatatccatgaatttttggtaataaaaagggaactgacgttatttacaacaggtcagttccctcacacagccatcatttatagactaggcagcgttaattatgccgccgccgctgcttcactcaccaactgctgtagctgcgaccataatgcttctacatggcggcgctcagtgcccaaagtgccaatggaaattctgaccatccaacgcccgcctaaagttgccgtagtcacataagcattgcccgactgattcaaggtttccgcccaagaacgggtgtaggcatccagcgcttctccttgtaaacccttcggttcatgccgcacgcacagcgtttgcaaattcagcggagccacaagcttccaatcctcatgttccgccatttgctctgctaaccagcgggcattatcgatatcgcgacgcaaccgcgcctgtagcccttcaacgccctgctcacggattaaaaaccacagtttgagcgcccggaaacggcgtcccagcggaatcccccagtcacgataattacgtacttgaccgtcagccgtcgactgtaagaagctcgggttggtgctcataatacgaatcaaatgctccgaatcacgtacacaataaaccgaacaatcaaaggcagctccgagccatttatgcggattcagcaccaccgaatcggctttttcgatcccaagccataagtgacggaattccggcaaaatcatcgcggaacccgccattgccgaatcgacatgcatccacagcccgtacttctggcttatatcaccgatagcatccagcggatccatcgccgtggccgccgtggttccggtggtagcaatcacgatacaaggacggtttccagcggccagatcctgctgtatcgctttatccagtgcgtggggagacagggcgttgtgctcatccgtggcgactaacctgatgttatttaagccaaatcccgccagcatcgccgctttgttcacgccgctatgggcttcctgcgaggtatacacaataagcggcgcggcgctattttgcatgccgtcctgcatcaatgcgtagtcggaagtccgttcccgtgcgctgattaatgccaccaatgtcgcagtcgatgcggaatcctgaatgacgccactccatgcatcactcagaccaatcatttttagcagccagttggtcgtgacttcctcaatttccgtcaatgccgggctggattgccaagataggccaattacgcctagcccggtactcaggcaatcacctaataccgatgacagctcaacgttggaggggaaataaccgaaaaagtgaggatgctgccaatgcaataaaccgggcatcactagcgattccacatccgccataatgtgttcaaaggattcgcctttctccggcgcggtcattggcagattggctttaatctcacccggcagcgtattcggatgcaccggccgctgctcaatattctggcgataatcagcaattaaatcgatcatggcgtgaccatgccgacgaaattcatcaggagtcataatttattatcctaaaaggaaaaagttaatgccgcttagcaccagaaatagaatggttcattggtgttatagccgataaatgactgcatgctgatgcgtttgcccgaatcaaacccgcaaattgcatgtggtcgacgcgtattaataatcaccagttcattcttttgcggctgaattcgcagcgggaattgcagacgttcctctggtaattgatcgccctcaaacagttcgacctcatcaaatgaaaacgcctccgtgtcccataccattaattctcccccggacggtggagtttcaatataaatattggcgctaaactgatgttctaattcggctatggagaatggtaggcaatccacgtggggaaccgtttcggatagatgagccgtctccgggaacatggcgcggataatcccggcaaacatcggttttccctcaaaagatgcggtaaccgctccgtctggccaatgttgttggaaatggtcaatcaatgcctgcaccggtggttttgctggcgcgcaaatattatcgatcagttcacgcatcttggctgcatcggcataatatttctctttggcaccgtcgccatcaggcttgccgtaggtcatattgaacggcgtcccccagcgatgcacgccgtagaaattctgcacaacctgaccatcttcataagtttcatgggtgtactggtgcagttttgccgttttatcgatgtaatcattcagcgatgaggcagtttcttccgtacagtagttagggattcttatggcaagaatttcgccactgattaacttttccagactgcgttggtcaagttgttctaaggtcacaattttggattggctagccgttgtggtctggttggtgatgtcttgtaggttagacatgatgatgatactactccgttagtttatattcactcatcaaaaccctttaaatacaaaggattacattatcatcactgcatttttgagaggatgcgccaacctgaggcaatggcttcattcagcgttccctcgctaataaccaaagatgataatagttatctttaccaataaataatcgcctgtatataacaaaattaatttattttatgaatattttgatttttttcgtataaagctatttgtctatagtcctgacctgataaaaaaccaacaaatactgattatttatccacctaaaggcccacttgagggaaaaatcggggagattgaaacagatgttgaatgaagtggttaaaaataaaatctattaatttcaatgataaatagattttttatatgcgtatagcccaatgatttgatgacgagatagagtgaaccttgccaaaattggcaacgctctaccctattgactctgcggttgtttacagattaaagactttaggcgaggagtaaatgctgcaactcagttaaagaactgacctgatagcgcggttgaattccttctggacgcgcatgcccctgagtatttaaccagcaagtatcaatacctgcgttaattccgccctgaatatctgaatgcggattatcgcctaccatcaagatttgctctttgggcggatttgccatcagattgaacgcatactcgaaaattcctacgtccggcttggctacccctacttcttcggaaataaccagcggcgagaacacgttcttcaaaccggtgcgttccaaacgaacattctgtaagtcagtaaagccgttggtaataatccccaattgagctttaccatgcagcgcattaattaattcctgcgcgccgggaagcagagcgcaaatatccgccatcgcgaccagaaactcactgtttagcgtatggggcgatacgcccaacctgttcgcccacatttcaaaacgagtgctttgcaactgtgcggcattaattttcccgttttgataatccacccacaatggctgattaaccaattgataatgctcataatcctgtagcgtaaattcagttttgaagcgggaaaacatcagttttaacccttggtaagcatcaaaatgaaatagcgtttcgtccgcatcaaaaagtatccacttgtacttcattctttctacgactcctgcggttaatacgccacttgggttcctgattttatcttagccggctattctccggtagtttgtctgtatgagcaaccttacaacgccatacatcgtgcaaaatatcagatcaataaaagcctgattcggctttctgaccggatatttactcggctacgccgctaaagagcgcagtatggtacggttgatttttactgggcgattgccttcggttaatggcaaattgaaaaccgagtgcgttttttcattcagcgtagacaaggcttcatccaatgggagtgccatatcttccgcaatatcgataagttcatctctggaccacagcagccgaccaattaataaacgtaatagcgccgaatgatcggcatctaatccaaaaatttccaccggttttacccaggtggccatgggctgaataggcttagatttttgttctacagtagcgggaaacatcgttgatagcactttatacagttcgcgactttcctgctgcaattgcgccactctggcattatcgttaatcattttagccgtggtctgagtcacgctaaccggcggtgattgatgcaggtcggtatagaccaatttactgtccagtgataaccgcacataaacccgctccagaaatttcacttcctgcggggtaactttgccatcggcctgaaccaggtgggccaaaaacgcggcaatagcccgtcgggttgtgacactgagcggctccatttttttacgtaacgcgcccaaggtgctggttttctttattcccggctgtaaatacgcttttaagcgcatacgttgaccggggctgatatgcccccaggcatcgacatgttggctgagcatcattaattctggctcagaaatcccgccgtctaccattaccgccgcgcaggccagatcgagcgttaccaccgttacccgataagccgggagcgtttctgattccgttgctagcaccgtgataggaaacagtgcaatcgtatcctgtgccgacggagtaatattatcggataaaatatcaggttcgaccccaagctgtattttctccatagctcggactaacgccatgactttattacgcgtcacctctccggggctatttaagcgggtaaatagttcgttgtaggtcatgagcagtaacccgtatcccacccgctctttgatattgtccaattcttgctttaacgcttctggccacagcgtcattggcagtagcaaaatagcttccagatcgttaattttatcgggattgagcgcaataaactggctgtaaccggctaactcggtgtaacaatcctccagaatcagccttagtttctctctgctatctttagccacgaccacatcaggcaaatcatgaatacgccgggtaaactgttgatccatcagccctgcggaagccgaacggtagcaaatctgtagtttggttttattcataggcagtatgaaaccttgcgggaaatactgtctatatcgctgttggaacagctgcgagaaaacgccaaaattgcgcgtagcggcaatattatgcggcaagttaggatcagataatgcccaggctacggcccaatccgccggtaatggatgctggtcaacggctaactgccctaaaccgattcgtaaacctaatggtaaatctgtcccgtagctgccaatcggcggcgaagaaagataagttttttccgtgggatcgagaggtgtgagataaaccaataagttacgtgcacaacgttcgaattcacgatgctcgccataaattccgagtaaacggataatttccgcttttaacgccggttgctcatttttggctgcaacgtctacgtttgcgtcaatcaataagcgatgttctaatccatagaagaacaggaaaacgtagccaatataagcttcaggagcctgacgcccttctgccagccattgcaaataagcgcggcgagcctctggcgatatcatggagtagttaggacgttcatcagtcagcggcaaagacatatcaacatgatcggcggccactttcagcgttgggttaataaacgcaggctctgcgccactgcgattacttttcaatttattcccgatgtagatcatgccatccggtaaattaattccggccaccacggccagttccccaggaggcagccaagaggctcgcgatagtgagccttgaggtagcactgaagcctgataattttgtttattcagctcatctgccagcctgaaaatataaaactcatcgtccgattgcagcgggagcgtcgccgagatgtccctctcgtcggaaggtatatcggaaagcaaaggcgaaggttcagttgccagttcgagcttcggcttagagacacgctttgcggctttcaaataatgccaaaagaagaaaatgcataatagtgcagcaccaacggctattgatgtttcttttggcagcagtgatagcaaagccaaaagaaacattaacagtatgacccagccagttgtggcagattttatcttagtcacgatggtttataagcccctatcttgaaataataatttttatgctgcccttaagggcaatttcttaataataattctatttttataaagtacgcattgcagatagccgaaatctccccgagttaatacaggtgaaatcaactcagcagattatcaatataagtaatttataataaagcctcccgatagcgggaaaaacaattatgccagcagacgctagtttgagcacgctgtttgtaaggaataatgccagggcgctaacaatataagtggctaaaaagtaggtagcagttgccagaacagcctgagtgtatccctatcacacataaaatgctgaatgattgctattttcaaacagaagaatctcggttaatctctcggaattaactttctgttttaacggatattttattctgatgggaaaaatctcatctcaatgaataaatgccctgcaaacatactggttgcaatacaaggatgacggtgacaaacagaattaactggcttgatacgccctcgcgttttggtttaatcagtcggacacttcattggttgatggctttgttatttttatggcaatttttcagcgtgattgtctggcatactttcggacgcaccgcatttaccttgtggatggataaacagggttcccacgcaaccgtaggctttttgctatttatcctggtaataatacgtgctttatggcgtgggtttaatagacaccgttacccgctttcgaggccaaataaagcgaacaagatcgccattgttgggcatattacgctttatttattgatgtttgtgattccctttttggcccttctccgctgttatgctgatggcaaaggcgtggttgtcatgggcatccctgtgttgccagccacggggattgaaatcaaagggattaccgtttggatcgatatgatgcatgggccactagcatggctgctgctcttttgcattggcggtcatatcctgatggcaataattcacagttttatacgtcgggatgctaatctccgccccatgatttaagtagaggcatcgattcaggatcagggtggagcttttctattacaccctcagcaatgtggcagaataacatttgaacaaggaaccgaacgacatgatacctaagacgaaattgaggaaaaaccttccctacgttttgatcggactcaatttactttttacggcgcaggttcatgctgaaattgacgatcggcgcgtgattgccgactgcaaaaaaattccttcttacgctaatgcaggaaataccgcctatcaaaaaggtgattacgttacagcgcaaaagcattttatgaatcaggttgcctggacagaagcctgccacttctctgacgaggtaaaagtagatagcggcgcccgagctacggcttataacaatatggcgctaacctatattcgtcagggagatctgcttaaagcaaaagcctggttaatgattgctccagaagataaaaaatcgcaatataacctgaagcttatcgctgataaaatagccgcattacctaaaccgacaacttatgctggtgaatattggcaatattcaggactgggtaattggaactccattgaagtcacgccaaaaggtaataaattcaccatagattacaatggttactattttggtattatgggcatctactatggccctaatatggggcaattctcttttgttagcagtattccagctgatggcaaggtagaatacgaccagagtaaagcagataaagaaactgattattccggtgactgcaaagttaatatgcaatttactcatgcggatgtgactgtagaaactgcgggtgactgcggatttggtcataacgttagcgctgatggcaattatattcgcgtcagataatcactgtttattagatcaggcaatcggtatggttgcctgcattattctattctcattcctctattccccagcaacacctcatcttataacgtaatgaccgagtaaatgtaggtatttataacgaaagctggcctatttacctatgaactaaataaatttaatatacttaatgtttttaaagcaaaaataagcaacataattatttatttaatactaaataattaacaattaatttaaaatagtgatcttgatcacgttttatttgataaatatagatagtatgaattttgagcacatcagtgcttgtctatttaaactgcaaaggagtgttaatatgggatatatggtttcgtttaatgctaatccagtaaatgcgtcagaagagagccattcacctcaggaagttcatttgactcactctgagaccgaagctcttaaggatgacgagtaaatataagtagtcattaacatactgacaactaagttatttgtctcttattttaatgactaaaaacattaagcgccgatagtggcctcatcggcgcttaaataactccctttccattaatagtatcatttaaccgaaaattccccacatgactgcttgctattccagggaggaattcctatgcgtcctattgagcgcgatttcacattatccgatgcaaaagatcgcgttatcaaagaaattgataatctgggtttgatgtggcgtaaagaagtttacggaaagaatattctgacgattgttgttacgttaaaacatccaaagaataacaatcaaacgatgggcgtaggtaaaggagattatgacaatgcttttgttggggcattatttgaagcactggagcattatattgaggatttttcctctcctctagccacagtacggcctgcaaagactctgatgcgtaagggaatactagctagtgacgatgtgctggatatgattagcactcaacctgatagtcatctggctacgcgccgcttcgcctctaccgcgggagatttttattatccattagcgctttgcgatcccaattattcccgtaaacctcttgccgatgataattttgactatcgttatctcgctcgctatggaagcaatagcggcattgctattggcgcaaaccgaaacgaagctttattacatggcataaatgaatgtatagaaagggatgcattatctttgtttcttatccagggtttatacagccgaagcccatgtacaatatatgaaattgataagcagagtttaccggaagacgtcgcacgcagctggcaaaattcagaagaggaaattcaacaaaggatacgagtactggatattactcagggactgaaatgtcgtacttatctggcgttagctgaaaaatcaaaactaataaaatatccaataggctgcggaacatcgctacatccgcaccacgcattgcagcgagcgttaagtgaattggtacaaatcaatgcggtatttaatcatagccaagagattcaacgagagaacgaagtattgcatcagcggttattaagatacaaaaaattagagcgttgtttttgcatgcgaaccgcggatatttttaacaccaatgaagtcttactgtgtcgcctgccagtttcagaccacgcagacagtcgccccgccgaagatcttgtcgagatagaacaggatttaattgaacaagggtttgttatcgggaagagtattctctatgaaacttctcaggtgtgtctaaccaatgttttaattcctagctttgaacgcttttatattattaccagcgggaatattgttttacctctgttaagaggaaggaggtctcttgaaaaaaaaactatctaaagatgattttgccgtcaggtggttaatcagagaacatcaatatattaaacaccagaaacagataggggatattcccgaaggcaatatagtgaccttaaccgaagaggttgaccttagcatggggagttatttcctggcacatgcggaagaggaatcctggctggggcgaaaatttatatgtgaaaatgaattaggtcgacaaagctggcccagcgtattaagcgatattaatttattaggtccgttcaattctgccagacgggaaggaaaccatgtcacgttcagttatattgccccctcttctcgccggcgctctagttttttccaaagcctattaaccgaccctatgggcgaaattgatttttgttttattcgcgattttgacggcgcacttccctctggcgataaattttggcaagttgaccacctttctgctgagagaatggctagggaagaacgccattttcagatgcacacagaactcagccttaaggtgttaaaaacccagggtgttatttacgatcccgcctgttctaccggtgattttctggcatccctggctaataaacttcctgagtttaattatattggttcagatatttctcctcagatgatcgaatttgctcgtgagagacataaggaacggcctatttctttttccgttggcgacgccatgtcttcccggcaacgctgcgatattcttattctgcgctttctgaatgatgaagtgatgcaaataggtagcgcggcgctcgcttttaatcatttgatcggcctattgaatcccggcgggatagcatttgtttttggtcatactcccgtattggttcccatcacagacctggcctcggcgcttggatttgaggtaataaagaatacggccagctcactggatcagtgccacatatttcagttttatatgttgagaaaatacccatgacgcaagtgcgtagctcaggtttcttcccggttgatgatctgcactccatatattgggagcggcatggaaatccgcagggcgaaccttggatcgttctccacggagggcctgcggggcaaagtcatcttattcatacggcattttttgatttgtcactgtgcgacgttttaatttttgatcaacgaggttgcggccaatctcttccttacggcgagcgaagaatcaataccatcaaccatctggtggaagatattgagaggcttcgatgttttttaaaaatgccgcgtgccaatattttaggtctctcctggggctgttggttaggcattttatacaaaattcgctatggcatgagcggtttgaaactggtaatcggttgcccttttattcctattgcgactgtgcaggagctgcattggttttatttccatcagcagatctgccagacgcataggctaaaaccttttatttttgctgaaaaccaacctaaatcggccacctactatcgctgtttacagattttggccacgggcctagccagtcagaagagatctatggctcaactttgggtgaataccgatgaaatcgcgacaaatgcgcaccaggatttccatcagacaatcacgttaaccgatgaatttttcaatccgcgaacttattccgccatcatgctagaaattcattaccatgccgccggattttttattaccaacgatatattgcgacaagttgcgcaaatggacgctcagggtgtcactctcgtttgtggtgaaaaagaccgaatgggtatggttgcaaccaactggttagccgaacgggttaacgttgaggtaatactcgtgcgggatatcgctcatcaggcgcttcatacagaaatgattaaacaactccggcatcttattgcccgatagacatcgcgctataggcagagagtcaacgataaaaatccccgcagccaacgcaaacggggagtatattatttccaataaaatcaattattacttcaacgccattacttcaacgccattacttcaacgccattgcatcacgcatggtaaagaacaggtcggtttggtcagttagacccacgacgttagccgcgtgagggccataggcagcaatgcgtagctgcgtgccggtatgaccttgagagtcatcttcggaattcccataactgatcgccatcaccgcgccatctttggtcattaatgcctgcgtcaaccccggcgccttggcatcggcctcgacgatctggctggaatgagcatggtcggcggtcacaatcaccagcgtgttgccgtcggcttttgcgaactcgagcgctttttgtaccgcttcatccaaatcaacagtttcaccgaactgaccacaagggttcgcggcatgatcctgtttatcaattgacgccccttctacctgtaggaagaaacctttttcattggttttcaacacttctatggctttttctgtcatggcggccaacgttggaatatccgcagtgcgttccggattcacctcgcaggtgactggagatttatcgatattaccgtggtatgacgccttcgggcctaaccaacgcactggcatattacccgccgagaataggccaagaacgggtttatcctgatttgcctgagttaccccattgagatcattcagactctcaacaatcagataaccgcgggcaatagcctggtcgcgcaaggatttatccttccactcgccggccttagccagttgctcaaaagattttgctccgccgcctagcgtgatatctgcccgggcttggatcatttgctcggttatcgaacctcttccgccgttttccagcgcattggtcgcgcatttttcgctagtttcttcagggccatagcatttgcgaccggtaacgtgagcaaactgagcggcaggcgtggcatcttgcaactctgcggtagaaacgttgccagtggctttccctgccgctttcgccagttccagaatggtgatgtgatctttgcctgtaacatccacacccaacgcgccgttataagttttaacgccgcttgaccatgcggtggctgacgcagcggaatcagttacataattcggtttttgcgtctttttgtctaaagagtaatgcgtgtattgacccgtcagtggcaaggcatcaatgcctttgaagaaaccgccggcacccgccgcatagttacgcgccgaggtgatttcagaatcgcccattccatcgccaatcagcaaaatgacattttttacggttttatccgataaagagtcgcgtaaagcctgcgtctggtcactatctaatcgacgagctccgccgaactgagtgatgtcgcctttcgcggaacggtcatataagcccgtttctgcggcactggcgttaggcatcagtaatgtgcaactggtagacagcaacagcgttgataatgcgactcgggaagcggtagaaatgcgctttgacatcggtagagttccttttgtaacacactaatacagtttgtatttattggttacattggatactagagcagccggatgacgtttttatgacggcttatgttaattatttcaccctcatttttaatcaaactactttaaaaaacatcggctcaattttactaacagaaagcggcattttgccgctctggcatgctttcccatgttccctatttaccgacatccctgcctcactgaaacatcaccatatttatcaaaaagttaaaccagtaagggcagaatttagcgagtaggaaagtattcactccgcggagtacgagttactcggtgtccatcggtctcactgactgatagatatcaatatcgaaataaccgtcggccattccgtcattcaaatagacctcaaaacacgcaccttctgccgggaggtagccactggcgggtaaatgcaggttatacaactctccccatgccttggcataatccccatcggtcacccgcgcacgataaaccgcataagtcccaccaggtattatttgtaaaagcacaccactgctggcatgcgcgggcaagacaaaatcatcggccacagaaaaagccacatcagcccgcagattggcgggtggcgtggtttcagggttatcccaataaagcgctagccaggattcatagggtaacgggtgctgctgctgccaggatgataactgtttgaaaccaagaggaatggtttcggcgtaagggccaatcacccgaatactgacaacttgctgcggctgtttttcaataatgcgaaatgtcatcgtagcggcctctcaagataagatttaggaagatctctcttctcacgaacggtttcaaatacgatactgagcctgattgaacgtgagtaaatatcaatgcgtcgtggtactgtataaataaacagtaccacgatattatctgaatatcgctcatttatacagcgttaattgcgctatttttgttctatttcgcgccaattgcctcatcaggcaagcgctcgccagcacgttgttggttggcggttgtttattttggaccgatttcacccaattgactcttccttaattcgcgaccaactcgccgcacaatcagcaacggtcactaaattgttgccacagttgcgttagaatacgcgacaatttttctgcccattgctgttgtccaaaggatggcataaggttcgttgaccccgacctgtaaatcgccttctgcacgtaataattcaaccagcaataaagcccattccggattgcggttaaacagcgtaccgatctgccaaggtctggccacacctttaaaagttggcgtaaaactatgcatagaaatgataacgctaggttgcccttgggctgcgcgtcgatccagcgtttggcgaataagatcgtggtaaggctggaaaatttcggttctgcgggcttctgcctgcgcgggggtgacactttgattgcctggaatcgtggtttgctcggaaatttcagggatagaactggcgataccgggagtacggttacagtcgatgaccaggcgagaataacgctgatggattaaggtggcatccagcagctcactgagccgttgagctacgggtaaagagccgatatcccagccaatatgtcgatctatttcgccgggcggtaggcctaaatcacctaatcgcgaggggatagtttgcccggcatggtcagccaggaaaatgaaaggagagactgcacaagcgcgttctagcacggccggcgagcaatcctcagcggttaataagggctgcgggcggtcaactgacatctttctgactccgatagattaggcaaaacctcatcctagtcgctatttaaggctatgcccagtcacggctgataacctggcataatcagtttgaaggataaagactaacgctttgtagttaatcagtgcgaaccacttcgcattgtcaatgataggcggcataaaactgacagaggctattcaaaaacgccggtttttcgtgccatactgctgttgataaaaccagtagataacccccacggagccttatggaaaccttttacattgaccgtactgacaccccagcaggtgaactggtcattattggcgatagcgaacataacctgcgcgccattgattgggtcgatcactatgaaagactgctgaaattactgacgtctcactatgggccaaatacttttacgctgactgaaaagattaatcctggcggtttaaccgagaaaatgcagcgttactttgccggtgagctggatattatcgatggcctgccggtaaaaactgcggggacggcgtttcaacggcaagtgtggcaagagttgcgcaacattccctgcgggaaaaccatatcctacggcgaattggctcaacgaattggtcgccctactgcttcccgcgccgtgggcatggctaatggcctgaacccagtctccattgtggtgccctgtcatcgcgtcatcggcgcgtccggctcgctgaccggctacgccggtggcgtagagcggaaacgttggttattggctcatgaaggttatcttttagcgcgctaagcattgttactcttatcagacgccttaaaagatgttaaaattgacaaatatcaatattaatgggaataccctcatgatcccggaaaaacgtgttatccgacgtatccagtcaggtggttgcgcaattcattgtcaggattgcagcatcagccaactctgtattccttttaccttaaatgagcacgagctggatcagctcgacaacatcattgaaaggaaaaagcctattcagaaaggacaggcgttgttcaaagctggcgatgagctgaagtctttgtatgctattcgttccgggaccattaagagctataccattaccgaagaaggcgatgagcaaattaccggtttccatctggctggtgatttggttggtttcgatgcgatcagcaatttacaacacccgagttttgctcaggcgctggaaacttcgatggtctgtgagattccgttcgatacgctggatgatttatccggcaaaatgcctaacctgcgtcagcagatgatgcgtttgatgagcggtgaaatcaaaggcgatcaggatatgattctgttgctatcgaagaaaaacgcggaagagcgtctggccgcctttatctataacctgtcgcgccgttttgcccaacgtggtttctcacctcgtgagttccgcctgacgatgacgcgtggcgatatcggtaattatctggggctaacggttgaaaccattagccgcttgctgggccgcttccagaaaagtggaatcctcagcgtaaaaggcaaatacattaccattgaaaataccgaagcgctggcacagctcgcgggtaacccaaaaccggtgtgctaatctgacctaatgccagatcaataatttgcatatttattggtctggctctctatcccccctgttctgtttttccatcatggtttactctgtaagtaacacactgttaatagtgattcgcagttgtaaggagaccctatggcaaagtatcagaatattctggtggctattgaccccaatcaggacgatcaaccggcattgcgccgagctgtttatctggtgcagcgtaacggcgggcaaatcacagccttcctcgctatctacgatctttcttatgatatgaccaccctgctttcgccagatgaacgaacggcgatgcgtaaaggcgtgatcagtcaacgcgcagcctggattgccgaacagtgtcgtttctacgttgaagcgggcattcccattgatattaaagtggtttggcacaaccgaccctatgaagccataattcaggaagtcctgagtgcgaagcatgatttgctgttaaaaatggctcatcagcacgatcggctggaatctattatttttaccccaacagattggcacttattgcgtaaatgcccctgccctgtgtggatggtgaaagatcaaccttggcctgaagacggtacggctttggtggcggttaacctgtccagcgaagatccacttcacgatccgctcaacctcaaactggtacaagaaaccaaagagctggccgagcatgttaaccaaacggcggtgcatctcattagcgcctatccggtgacgccaatcaatattgccattgaactgcctgattttgatccgagcgtatataacgatgctattcgcggccagcatttgatagccatgaaagcgttgcggcaaaaatttggtttggacgagaaatacacccatgtggaaaaaggtctaccggaagaagtgattccggatctggctgagcacctacgcgctggcgtggtcgtactgggcacattggggcgaaccggtctttccgccgcttttatcggtaatacaaccgaacatgtgatcgaccatctgaaatgtgatttgctggcaatcaagccggatggatttacctgcccagtggagtgtaatgaggatggtgacggtctgtcatccaacggataacgaccactaagcttagcggcgataaatttagcgataacctcttcaataccaaagccagtctgtgaaaacggactggcttttgcttagtgagctaactcaaaacgatatcaaaacgataggttgtctgctccgcaccggtgccgataaatcaggcacatccggtgcgttccctacccttgaaaattcccttacagcagtgtaatagcaggtttttagccttagcctttggctgataaaaaggacgccagtcgctccagcgcctgcttgcatcgagtattcattcagctacaggaaggctttgtatggcagctctggctcatcgataaagatatcgtggaagcctcggttatgctgataatgcattttatgcttgtccgttggataggtgtactttccgccgacttgccagaagaacggcgcaaatttgtagtccaatcgatcttttttcattttccacagtacctcgatttcacgagtgtcactttggaagttagcccagatatcgtgatggaacggcaccactacctgcgcattcagagattcagcggcgcgcagaatatctgatgaagtcattttatccgttacaccgcgcgggttttcaccgtaggacaacagcgcgacgtcaatatcgtaatcgttaccgtgtttagcgtaataatttgagtagtgagagtcgccagaatggtagatcgtgccaccgctggtttttatcaggtagttcaccgcacgctcatccatggtatccagcagagccttatccttggaggatgtgccttttggtaatgtaatcagtgcagtacggtcaaaagagtccaacacggtgatttgaatatcgccaatatcaatcaccgatccaacttttgccacgatgcagcgttcttccgggacgccccagccaagccacagattaacgcaggcctgcgggccgataaatttcacatgatcgtcgcagttttgcagcaccgcggcagcgacgttgacgtcgatatgatcggcgtgatcgtgagtagccagcacggcatcaattttcttgatggcaaaagggtctaatacaaaaggcgaagtccgaagatttggctgtaatgcccgcacgccgcccatacgcatcatttgatgttgagcattcatataaggattagactgcgttcttttcccagtgccacaccaaaaatcgatagaaatgttggtatcaccggcggatttaagccagataccggtacatcctaaccaccacatggcgaaagtattgggttgaacctcggttttttcgatttcttcatttaaccaggttccccactcagggaaagtgttcaaaatccatgactcacgggtaatctcgtttactttgctcataatcagacctttaggataaagaaattagaccaaaatgacgtctaccccctgcgctttcaggctgctgataacctctggatttgcatccttgccggtaatcagaatatcgattttactggctgggcaaaacagtaaacccgtgcgctgccccactttggagctatcaacgaccaccaccagtttgctgattttgttcagcatctgctgttccgaaactgcggttaacatatcggttttatacagcccggtttcattgagcgccttgccacttgtaaacatccatttgcctgcataagcatcaaaagttgtcgaggtagggttaagaataatattttgcgttttgttgtattgacctccaataatgatcacgcactcgtggtcgttctcaatcagataacaagccagcgggaagtaattcgtcacgatttgtacgtcgcgcccgcacaaagtttgtcccagtaaaaatgcggtggaaccgcagttaagcactatgctgtcaccgtcctgacatagttccgatgccttggcggcaatgcgtgatttttcttcatagttatcggcgttattaatgttcagcggcgaccaggcctgcttctttttatccacgatgcactccgcaccgttgcgtacctttcttaactgtttcaatgcatccagcttggcgatgtcacgtcgtgccgtcgcgggtgaaatatcaaaacgctcaataagatcgttaatagtgagagaccgcttcgcatttacccaagccacgatttcatggtgacgttgcatttcattcatttcagtcatcctacgataaccgctcacatgctgattacatggtgattggttttgatttaaattgatcatatacgtgagaaaaataactgtcaatgtcataatattcaacaattgaatggctactctctcggtatacccttaatttctttatgcaagaaaggtcatttattacttatcacaatctatttatatgtttattttcaatgccttaaagtaattacataaccacgaagcccttattagtgtgagtaaaatcaaattaatcacattgaatcattgaatgatcacctttgattatatagcttgttgttgtgtcatgtattatccgagaaatggatctctacagggcggtggcaaagattccgtccaaccatattagtgtcagggggtggtatggagtatctgtatgatgtgttttatatcttctacagccaggtcatgaccaaagcgccgttgctgcttggtctggtgacttgtatcggctatagcctgctacgtcgtgatatcacaaccattattaaaggaacaatcaagactattgtcggttttatgctggtacaagtcggcgcaacaacgctggtatccagctttaaaccggtcatcgaaaaaatggccgaattccacggtctgacaggatcggttatcgatccctatacgtcaatgatgacaaccatggaaaccatgggcgacgattattcctgggtcgggtacgtggtattactggcgctggcaatcaatattctgctggtggtgctgcgtcgctacaccgggattcgcaccattatgctaaccggccacattatgttccaacaggctgggttgatcgcggttttctactttgtgatggcggttcctatgtgggaaaccgtgatttactcatcgattctcctcgccctttattggggtattttctccaatattatgtttaaaccgacggaagctgtgaccggcggcgcaggtttctctatcgggcaccaacagcaggccgcctcctggattgcggtaaaagttgcacctaaacttggcgatccgaaagataacgtagataatctgaagctgccgaagtggctgcatatattccatgacagcattgccgccactgctatcgttatgacgctgtttttcggcgtaattttactctctttcggcatggataacttgcgttcgatggcgggcagcactcactgggccatctatatcctggagaccggcctgaaattcgccgtagcaattcagattattgtgaccggtgtgcgtatgttcgtggccgagctgtctgaggcttttaaaggcatctctgaacgcgttattcccaatgcggtactggcgattgactgcgccgcgatctacgccttctcccctaacgcgatggtatttggttttatctggggcgctttagggcagttcactgccgtattggtgatgctggccttcaatacatccatcatgattattcccggttttattccgatgttcttctccaacgccactatcggcgtgtttgccaaccacttcggcggctggcgtgcggtcatgaaaatctgctttgtaatgggaattatcgaagtattaggatctgcctgggctattgatctgtttatgcagaatggcactaccttcaatagctggatgggtatggccgactggtctctgctattccctcctatcatgcaaggtttatctgcttcatccttaactttctacctgttgatcgcactggcgctggtttatatgttctttgcctcccgcactttacgggctgaagaagatgcagctaaagcgctggcggcactcccccctgcggtagatgaaaatccggccgaagaggcaaaacccgaacattctaccgatgcgcccagcgtcgaagccgctaaaccggttcggattctcgccgtctgcggcaacgggcaaggttcttctatgatgatgaaaatgaagatcggcagctatctagagaaaaaaggcattccccatcacatggattcctgcgcggtttctgactacaaatccaaactggctaataccgacattattgtttcgtcaaaacacttgtcgagtgaaatggaagttggagaaggtaaatttattcttggggtacaaaatatgctgaacccacattcttttggcgaacagttgcttgctctgattgagcaagttaaccaacaaaaataacctaaattttaattttgatgacacaccagagctaaccggggagatatcactatgaccacctcatcactgaaaagctcgttgatagaaaaccgctccatcatgttacaggcgcaggccgaagactggcgcgcggccatcaagctgggaaccgatatgctgattgcctcaggtgctgtgacgccggcctaccatcaggccattatcaacagcgttgaaaagctcggcccttatatcgttattgcaccaaattttgctctgcctcacgcccgaccggaagacggcgtaaatcgcacggcgtttgcgttagtgaccttaagcgaacctatttatttcgacggagaagacgacgcggtggatgtgctgatcaccctcgcaggcagcagttcggatgagcatatggcgggattaatggaggttactcaggttctggatgatgaaaacagcgaaaccggagtcgatctcgacaaactgcgccgctgccgtagcaccgaagatgtttatgcggtgattgatgcggcgctgcgggtgtgacaaggagaataaattatgtatcaagctttgaaacatcgggtgctggaagccaacttgctgttgcctcgctacggtttagtgacctttacttggggcaatgcttccgagattgatcgaaagcatggcgtcatggccattaagccctccggcgtggaatatgaccagatgaaagccgaggatatcgtggtgctggatctggagggcaaggtgatcgagggcgatttaaatccctcgagcgataccccgactcatcttgagttatatcgtctctttccggcgctgggtggcatcgtacatactcactcgcgctacgccactatttgggcgcaggcggggaaagatcttccggcgttgggaacgactcatgctgactatttttacggtgatattccctgcactcgtccactaaaagacagtgaaatcaatcagaattatgaaagaaacagcgggctggtgattgatgaaaccttcagaatgcgcggaatcgatccggtagccgtacccggcgtattgctctatgggcacgccccctttacctggggaaaaaatgcgcttgaagcggtacataacgcggtggttttagaggaagtcgccgccatggcgctggcgacacgctcgctcaatgcacatattcacctgcagaatgctttgtcagataaacattatcgacgtaaacacggcagcaacgcctactacgggcagcgctagccgcaccacgctcctgcttcgctatcacatcggcatctggttaacggatgccattgactgaaaaggactatcactatggccaaacctatgcttcaaatcgccctggaccaaaccgatctggccagcgccgtgactctggcaaaaagcgtcgcgggttacgtcgatattatcgaagtcggtactattctggccttcgccgccggaatggaggcggtgacgacgttacgccaaaaccatccgaatcacctattagtctgcgatttaaaaaccaccgacggcggcgcgattttatcgcgaatggctttcgaagctggcgcagattggctgacggtttccgccgccgcgcacatcgccacgattgaagcctgcaaaaaagtagccgatgagttgggcagagaaattcaaattgaaatctacggtaactggacgctcgatgatgccaaagcctggcgcgctctgggtattaaacaggccatttatcatcgttccagagacgcagaattggccggcgtgggctggagcgatgatgacctacttcgcatgcgcgctctgtctgatttaggactggaactctctataaccggcggcatagtaccgcaggatatccgcctgttcgaaggcattcgagccaaagcttttattgccgggcgggcgttaaccggcgaaaaaggtcagtccaacgcgcaggcattacgcgctgaaatcgataaatactggtcgtaaccgatatggcccgggaggctgataatgtatacaaacagggtaaaccagattgtcgggatctatgagaaagctctccccaacgccatgccgtgggaagaaaaacttagagtggccaaatctctgggctttgatttcatggaaatatcaatagatgaatctgatgaacgacgcgtgcgactggattggtcagacgagcaaatctatggcctgcgtcgcctgtgtgaacagtatcaaattccgttacattccatgtgtctcagcgctcaccgcaagtatccctttggttccgcagataaagttattcgcgaacaggctaaaatccatatggaaaaagcgattgattttgcttacaagatggggattcgcgtgatccaattggcaggctatgacgtttactacgaaagttctaacgaacatactcaccagcgttttattgatgggatgaaatggtgtgccaaacaagccgagcgcgcaggcgtgatgctggcggttgagattatggataccgactatctgaattcattgagtaaattcgaaattctcaagcgggaaattccctccccttattttatggcctaccctgacgtgggcaatattaacggctggaattacgatacggtaacggagctgaggctaagtcgcgaccatatagtccagattcacctgaaagacacccttaaggtcagagaaaatgcaccgggccagttccgcgatttggttattggtgaaggcgaagtggatttcaccgtcattttccgcgcgcttcgagatatgaatagccgtgttccattggttattgaaatgtgggcgcaggatgaaaactggcgcgaaaacattctcaccgcgcaaaaacagttgaatcaggccgccgaacgtgccaacttcccgctgtatttatccccgttatctcactgatttattgatataaaaaatccggagacagttgcgctccggatttttgttttgttgcttggaattcgtttttaccgttcaattcaaggagccgaatcttcttcccgctccttttcttaacgattacaacgcgcgcagaatggcttccacactagctttagcatcgccaaacagcatttgcgtgttgtccttgaagaacaacgggttctgaacgccagcataaccggtattcattgaacgtttgaacgcaataacattctgcgctttccacacttccagcaccggcattccggcaataggactgcgcggatcttccaacgccgccgggttaaccgtatcgttggcaccgatgaccagcacggtttcggtctccgggaagtcttgattgatttcgtccatttccagtaccacatcgtacggtaccttggcttccgccagcagcacgttcatatgacccggtaaacggccggcaaccggatgaataccgaaacgaactttgataccgcgcgcctgcagtttggcggtgatttctgccaccggatactgcgcctgtgctaccgccatgccatagcccggagtgataatgactgagctggagtttttcagcatttcggccacgtcttccgccgtcgtttcacggtattcgcccatttcttccgcatcaccgacggacgaaccgtcagtaccgaagccaccggcaataacgctgataaacgagcggttcattgccttacacataatgtaagacagaatcgcaccggaagaacccaccaaagcgccggtgacgatcagcaggtcgttgctgagcataaagcccgccgccgcagcagcccaaccggagtaggagttcagcatggaaaccacaaccggcatatccgccccgccaatggaggccaccagatgccagccgaaagccagcgctatggcggtcatcaggaacagacaaatgccctgcatcgctacgctgtcggttttcacaaacagcaccatcaacaggaatgacaccaccaacgccgccagattcagcttatggcgatgaggcaaagtcagcggtttagaagagataatcccgcgtaatttaccaaaggccacaatagaaccggtgaaggttactgcaccgataaagatgccaaggaacacttcggtcagatgaatgttctgcatcacaggctccattggtgcgccgtgatccagataactgttgaaaccaaccagtaccgcggccagacccacgaagctatgcagcaccgcaaccagctctggcatttcggtcatttcgacttttttcgccagataaataccgatggagccaccgataaccatagcgacaataatccagccaacgttgccggaatccggccccataatggtggcgatcagtgcaatggccataccggtaataccaaaagtattaccctgcttggaggtttcgtggcgggataaaccggccagactgaaaataaataaaatcgcggcaactatgtatgcagctgttacgagaccactagacatcagttaccccttagtgtttacggaacattttcagcatgcgctgagtcacggtgaaaccaccgaaaatgttgatgctggcaatcagtacggcaataaaggataagaaacttacccagccgccgtggccaatctgcaacaacgcccctaccacaatgatgcccgaaatagcgttagtgaccgacatcagcggcgtatgcagcgcatggctgacgttccacaccacgtagtaacccactacgcaagccagagcaaacacggtgaagtgtgacaaaaactctttcggcgccacgttggccagccagccaaacagcacgatggcgatcgccataaagatatatttggtccagggagacgaaggtttagcctgaggtttttcaatcggagccgccgcttttgccgcctgaggctgagcagaaacctgaattggcggcgcaggccaggtaatttcaccggttttcaccacggtaacgccgcgaatcacggtatcctcgaaatcgatatcaatttcgccgttcttctctttgcacagcagtttcagcaagttaaccaggttagtaccgtaaagctgggaagactgggttggcaaacgacttggtaaatcggtgtaaccaataattttaacgccattatcagtcacggtgattttgtctgcgacggttagttcgcagttaccgccggtttgtgccgccagatcgaccaccacgctgcccggtttcatcgaggcaaccatttctttggtgatcagcaacggagcaggtttgcccggaatcagcgcggtagtgacgataatgtccacttccgccgcctgcgccgcaaacagttccatctctgccttgatgaaagcttcggacatcactttggcgtagccatcgccgctgcccgcttcttcttcaaagtccagctcgaggaattcggcccccatactctgaacctgttctttcacttccggacgcgtatcgaaggcgcgaacgatagctccaaggctgcccgctgcgccaatggctgccagaccggcaacgccagcaccgataatcatcacttttgccggaggcactttacctgcggccgtaatctgcccagtgaagaaacggccgaattcatgagcggcttccacaatggcgcggtaacccgcgatgttggccatggagcttaaggcatccatcgactgcgcacgtgagatacgcggcacagaatccatcgccagcaccgtcacttgacgttctgccagttttttcagcaattctggattttgcgcaggccagataaaactgaccagcgtgctgccctcacgcattaaggcaatttcatcctcaaggggcgcgttaacttttaggatcagatccgattgccacacattcgccgtatccgtaattgtggcgccagctgactgataagccgcatcgtcaaaactggccagtcgcccggcatctgcctctatggcgacggtaaagcccaacttcagcagttgttccaccgttttcggcgttgctgcaacccgggcttcattggccaaccgctctcttggtacaccaatacgcataatgttcccttttagttctcttcgatgatgagtgtgtcgtcatcctgcctatagttgtgatttcgttacgccgaatcttcgcgccgccgaaacctgcttgctacagcttcctataacctactgaaaatgtgactgatgatccatatttgtctgcatcacattaacgctttttgcataaaaactgatagccaatgggaagattgtataaatgactatcaatattatatttaccagagtcttatcctgccatttatggttagattaaatttattccatccattctatgaatccagtaaatacgtggcctgaggttagcaaaatgtaaataaatcgagcttatgtcgttaattgtattattatcaaaacttatctgtattagcgggaaagaacgccattgattgccggtagtaaatagtcacactgtgcggcataaattgctgagacacctgccattattacatgtaataatcatcggctattctgttacacatcaatagttctgctcgtataacgttaatgcgcaaggcgaaaggattttttatgaagctgaaatacacgatcatcgcgtcagcattgctatcactgactgcattttctgctgcacaagccgcgcaagaattagcgccggaaaaagcagcctccattaaaccgttccaacgtataacaattaccggtcggtttaacgcaatcaatgaagcagccgctgcggtgtcacgtcgcgctgacgcattgggcgcagacgctttctatattcaggatactaacagcaataataacggcggtaactggcgtgtaacggccgatctgtaccacaaagatgcggaaaaagtgagtcaagagactcaataccgcaccttcaacggcgtaaaagagctgccgaagaacgaagcttatctgctggagccttttgataccgtgtctgtcagcggcttcttccgcagccaaccggatattaacgacgcaatctctaaagaagcgaaaagaaaaaatgccagcttcttcttcatcgtgcgtcaagtcgatgccaacggcggcggtaaccagtttatcaccgcttacgtatataaagctgatgcgccaaaacgtaaggtgcaaagcccggacgtcatccctgctgattccgacgcaggccgtgccgcactggcagcgggcggtgccgaagcggctaaagttgaactgccgggcgttgcctcttctggtacgccaagcaatgccgtgggtcgcttcttcgaaactcagtcttcaaccgggaagcgttacactgtaactctgtccgacggtacgcaaattcaggaactgaataacaccactgcggcacaaatggtgccctttgattcagttacctttaccggtcacttcaacagtatgaccgatgtttcgcaagaagtggctaaacgtgccgcagcgaaaggagccaagtactaccacgtgactcgtcagtggcaaaacaaaagcggcggcaacctgaccgttagcgctgatttgttcaaataatctttgcggggccgcctaaggttgccccgttttacttttgtttccgccattctttaccctcttcccgcccaacggcctttctggttgcgcaaatcctgaacgactgaataactttttatcctaatcgcataaccaatcattgcatccacaccccgcactccgtaaaatcttggcactttttagggctattatctttcagctatcggtgccgactccccatatcctgctagttgatagctgacatccatagattaattctttaaataccaggactgctagcattggaaaaaaaactcggcctaaccgcgctaaccgcacttgttctcagctccatgctaggcgccggcgtctttagcctaccgcagaacatggctgaagttgccagtccagcggcgttacttatcggttggagtattaccggcgtagggattatcttcctcgcctttgccatgctgttgttgactcgcctcaggccggatctggatggcggtatctttacctatgctaaagaaggctttggcgatctggtcggctttttctccgcctggggttactggctgtgcgcggtgatcgctaacgtgtcttatctggttattgtgtttgccgcgctgagctttttcaccgatacgccagatcacatcgtttttggtgaagggaatacctggcaagcattgatcggtgcctctttcctgctgtgggtggtgcacgccttggtattacgcggcgtacagactgcggccagcatcaatttggtggcgacgctggcgaaactgttacccttaggcggttttattattctggcggcgatcgcctttaatctcgagacctttacgctggatttcagcggcatcgctttgggtacgccggtgtgggagcaggttaaaagcaccatgcttatcactctttgggtgtttatcggtgtggaaggtgcagtagtggtttcggcgcgggcgcgaaataaaaaggacgttggtcgggcaaccatgctggcggtgttatctgcactgagcgtgtatttgctgatcaccttactgtcgctaggcgtagtaccacgcgccgagctggcagagatgcgcaacccatcgatggccggtttgatggttgaactgatggggccactgggtgaaatcgttatcgccacgggtctgattatttcagtctgcggcgcttacttgagctggaccattatggccgccgaggtgccgttgcatgcggctaaacatggcgctttcccgaaagcgttttgtcagcaaaataagaataatgcgccatcccaatcgctgtggtttaccaacggcgcggtgcagattgcgttggtactgatttggattaccggaagtaactataatacgctgctaactatcgcttctgaaatgattttagtgccgtatttcttggtgggcgcatttctgtttaaggttgcgctaaaacgtcaggattggcgcttgattgtggcggccagcggtgcctgcttatacggtttatggctgatttacgccgccggtatgctgcatttgctgctgtcggtattattgtatgcgccgggattattggtgtttatttatgctcggaaaagtcaccatgatatgcgcatcttaaataaaatggagcgcgtggccatttgtctggtaatggtcgctaccctgcccgcgacctggttaattatgcattaatttctaatatgttcagctatctacatatgttagtaaaaataaaatgtcagtaaaaataaagtagatgctgaacagccttttgtagcagaaatgcatgaatcaaaattgatattgaggtggcaagaagcccatcgattaatagaaaatttggagagaatcacagttggaggcagtttcgaggaagcagtaaagctaataaggctgcttttcatggaaccaaggcattgataaaaacaatccaagcatcgaaaaaatctcattacccaagggtatcaacaccatctgactaacaatgagacgttacaggatagcaacgatagactagatgatattgagcaacgcataaataacggaaaagaaaccgagcatcaaattcaaattatcagtgagcaaagccgaacttttgctgaatttctgagtgatagaatataaagataaaatggccaagagcgacgcttgctcgccatgaacagcatatttaaggctgaatgacgggcaaattaaccagcaaccgctcgccgtttaacgtcaaagcaacctgcggtgagcactgacgtgaaatagccgccaattgaccgatatccaaaccatagggtaattggacttccagagattgaatcccctgttggcgtgccaaccgaattaaccgaatcatattggtttcatcgctcacctgtgtagatagcacctgcaaagctaaggcggttaactgctcttgtgggttcttttctgattcagtttgagattttttttaccaccatgccgaagataggcattacaccataaatcgcatcgacaaaactccagcgttttttgcaggaagccgatagaaatttcatgtaatcaaagcagatggtttcgcgctgtatccgctcactactcatcccctaatcctctcttaattcaaaatagtgttggactacggctaaatagagacgacgtgacagtcagtgtcaccaatataatgacataattcccttactgtttaccagacggagccgacgctttaatcatacgaatgaataattgcgcgatacagctcaagattagacaccaaatcctcatggcattgccctcttcggcgcgctatgctgaattccgtcacttttatcgcagattcttatagaccgggaaacatgactaaaattgtttttgtcgaagacgacccagaagtcggaaagttgattgccgcctatttaggcaaacatgatattgacgttctgattgagccgcgaggcgacaccgcgcaggactttattaccgagcaacagccggatttagtgctgttggatattatgttgccgggtaaagacggtatgacgctttgccgggatctgcgtcctcattatgatggcccgatagtcctgctgacctcattggatagtgatatgaaccatatcctatcgctggaaatgggtgcgaatgattatattctgaaaactacgccacctgccgttttgctggcgcggctgcgtttacatttacgccaacggcaaagccagagcaaagagccacaggtagccacgctgaccaatcaaaacgcgattcgcttcggcctgctctgtatcgatccagttaatcgtcaggtcaatctgggtcaggaggaaattacgctttccacgtcagacttcgatttactttgggaactggccacccacgccggtattattatggatcgggaaatcttattaaaaagtctgcgcggcgtcagctatgacggaatggatcgcagtatcgacgtggcaatctctcgtttacgtcgcaaactttacgataatacgctggagccattccgcattaaaaccgtgcgtaataaaggttacctgtttgctcctaacgcctgggaatccgtccaacaatgagaaaactattcatacagtttttcttattgctgtttgtctgctttatggtgatggcgatgctggtcgggctggtttataaagtcaccgccgaacgcgctgggcgccagtctttagacgacttgatgaaaagctcgctgtcattgatgcgcagtgaactgagagaaatccccctgcgtgactggaataaaaccatcgaaacgctggatttgaatctttcgtttgaactgcatattgaaccgctggataaacgagatttagggccacgcctgaataaacgactgcgggcaggagagatcatcgctttagacgatgagtactcattcttgcagcgaattccgcgcagtcattatgtattggtggtcggaccggttccgtatttattctatttacatcaaatgcggctgttggatctggctctgctgattttaatcggtatgtcgctggcgttgccggttttcctgtggatgcgcccgcactggaaagatctgctacagctagaaaacgctgcccagcggctgggttccggacatttagatgaacggacgcactttgatccgacttccagtctgaatcgtctcggcgtcgcttttaatcagatggcggataacatcagcactctgattgccagtaaaaaactgctgattgacggcatagcccacgagttgcgcaccccgttggttcgtttgcgctaccgtttagccatgagtgaaaatctgagcgaaacagagcaactggcattaaaccgggatatcggtcagttggaatcattgatagacgaactattgacttatgctcgtctggatcgccctcaggtttctcttaatctggagccaatagatttaccgacctggctgcaaactaaagtcgaagatatgcgcctgattcaccgcgagcgagaaatcgcgctggatattccgcacagtggcgattttggtgcggtggatttacgcctaatggaacgagtgctggataatttggtgaataacgccctgtgctactccaatcagcgtttgcgcatcggcctgtggttcgacggcgatgaagcttgtctgcaggttgaagacgatggtcccggcattccgccggatgaacgcaccaaagtgtttgagccttttgtccgcttagatccaagtcgcgatcgcgcgaccggcggctgcggtttaggcctggcaatcgttcactccatcgcgcaggcttatcagggacgcgtttttgtagaaagcagttctttgggcggcgcgagcttccgtttctgctggccagtcaaagattactacagtttatccgtagattcagacgcagtatcagataaaaaataaatagcaaaaaaacgttgattatcatcggttaactaatggagtgccctatgatcacagcctatcatcagctgcgcagcaccttcactcgcctgtctcgttttgaacatctctcggctattgccggctgggacatgcaaaccatgatgccccctaaaggcaatttggctcgctcagaggccttggccgagctaaacgtgctgcatcaccaaattctgaccgcgccacaggtcggccaatggcttgagcaggcggaacaggaaactctgaacgatattgagaaagcgaatctgcgcgaaatgcgtcgccactacgataacgcggtactggtgccagaaagtttggttgaagcgaaatcgctggcaggcgcgcgttgtgaacatgcctggcgtcagcaacgcatcaataatgattgggcgggctttgcagaaaatctgcgagaagtggtgaaacttagtcgtcaggaggccgagatccgtgcgcaggctgccggcacatctcgctacgatgcgttattaaacctgtatgagccgggtttacgcagcagcgatttggatcgtatttttggtgatttaaagcaatggttaccagatttgctgcaaaaagcgatcgtcaagcaggctaaacaaccacatttaacaccagtcggcccatttgatttagagaaacagcgccagcttagcctgagtgtcatggcgctacttggttttgattttgacggtggccgggttgatgttagcgtacatcctttctgcggcggtgttccgcaagatgtacgtatcactacacgttataacgagaaagaattcactagcgccctgatggggatcgttcacgaaacggggcacgcccgctatgaacagaatttaccgcgcgaatggttaggccaacctatttctcatgctcgctccacggcgatacatgaatctcaaagcttgctatttgagatgcaattggcacgtagcgacgagtttctaaagcttttgctcccccttgctatcaagcactttggcgaacaagcggcgttaaccgaggacaactttattgcgcttaatcagcgtgttgaagccggttttattcgggtggatgccgatgaggttagctatccggctcatgtgattttgcgttacgaaatcgaaaaagcgctgatcgaaggcgaaattgaggttgaggacattccggcacagtggaatgaaaaaatgcagcgttatttggggctaaataccgagggcaactatcgcaacggctgcatgcaagatattcactggaccgacggggcttttggctatttcccaacttataccttgggcgcaatgtatgccgctcaattattccaaacggctcgtgaagcgattccaaatctggatcaacaaattggtaatggcgatctcagcgccttattcgcttggttgcagcaaaatatctggcagcacggtagccgttatctcaccgacgagttgataattaaagccacgggcgaaactcttaatccgcgtttcttccgtcagcacttagagcgccgttatctctaaatcttgcctcaggccgcctgaaaatggcggccatgctttgcccctggcattcataaattatttaataacaaccactcacactaatttttaatgctaatcgcacagccgaacgtctaatacaaacaagatttaaacaaaatcccgtttcccctgtgaaatcccctaaacccctaaattggatatttacacaccaagacagaacgccatattgagcagcttgggggctacctaactgccctgctactatctgcaggacttttaggcgttgttatattccccgattatttgttaatcgcaaaagcttcagatggcattatttgaactaaagcacgctgtatgttgtaactaaaatgagattcgaagtgatgaagttatgctttagcatcatcaactcttggctatgtgcagaaaatgcagaaaagtacgatgggtaagcttttactcttcagaggcgtaaattgcgtcgcttgatttgtcattatatttgatagagctgcttagttagactgataagagaggttccggggttagttcgaaatttaagcgggtaaaactatcagcccacaaattcctttgtttacctcagttaatgctcgatatttatttttcgatgccccctccccgcacctctttaaataagaatggccatccctgatagagataatcgagggatggccagagtcttagattagatttattacagtatccagtatggcatcaaactctgtttacaatgccaccccattaacactgaattccaggttggatgttggtttagcaatatcaatggacgatacctccacgccgccgacaaaaatagatgcttttatcggattcaaaccttcctctacgttaatgtggaatttgttcatacaggtggcatcaatgcggttagcagagagtttgaattgctgaacgaccccaccttcgaattgtacttcgagataacaaatattggctcggttaccgtcaccttgataaaccataccgaatgaaccatgtaatgccgggaagatataactgctcagcgccccctgaggatcgtaataaccaaccaatgtagtgaccgctaccccttgtttatatggacgtttggcttcgctcagcgagtaatcggcaacttccaaccaagttttaccattagataaataaacggtgttgtggttataggcaatggtatagagctggttattcacatgaagcaaagaagtagagttagttacgtttttaactcgtacggctttacctttattctcctctgtagcaataggaatataaatatccttagcaaaactcttatttttaaacgacacggtaatcagatcatggcgttcaagtaatgccgtcattgatgccatggtaacttctgaaggcgctgcatctttatttgacttggtttccacccggttttcccaaggttccattgtttgagtcgtggcattccacttattaaaaccggtaggcgaatggcgatcaaatacggctttattctccaggaaagtttgaatttttgataacgaataaggtgtatgcagggtaaaagcattactttgcatatacattggcgaaccactcgccatcgcatcgcgaccaaaactgtgcccggcaaaaggtgctgcgcattgctcatcctgacaggttggtttgttgctgattgtattttcgaagttagggatgaactgatcgttatcgctgtcccaaccccagcaggagtttggcttatccggagcctgatgaatagaacccgcgtatccgtttggataatgtcctaaaccgtagttatggccaacttcatggctgaactcattcccaatactgctttccagggtcacaataccgccgccgccggataaaccatgtacgataatcccattgacgtacttaccaatggaattatgcgcagtaagctgtgcggtactgtacggatggccgttttcccctttcccttgtgaggagttgataccgtagttagcattattaataccgatggaaatcagttctttaccaatgcgctgacgcattgttccctcataaacgccaccggtgcttggatcgtaatcggttagcagcacaccttccggcaacatcacttctttgaaatactgcggttcgtactgtgaaacgatcagtcggctcaatggaacctgttggaaatactggcgatgatattcattttttttctggaattcgaatgcgttgcgatacggcgttaacatacctaaatcaatggtgtggataattaactcgttcgacgccccaacctggatattaccaagttggccgtgtttgccgttatgttcaaaatcaagctgaatacctggaacgattttttcaaacggaataatgaccgaccagaagccttcaccaaaagaaatctggctatatttcacatcatccagactgtaccaagaacctttataattacgcagcactatggtcagaccacgattcagcgtaacttttttacctgagtagtggataaatgaattatatccggcattcgaggagaaagtgactaatttaccatccagttcatccgcaacaggcatataaaaatctttaatccaaccaccatctcgagtgctgatctttaaactgttattggtagaaagaatggatttaatctgattaccttgcgtatcattttgtagtttattcagctcggcctgaccagaaatggatttgtcataaactgccggttcaataaagtcatcttcactgccgttgaagtctttaatctgctcaaccagccgcgtcaagtccttgggcggacgcagggtgtaagtgccagccacctgattttccgcatctttcagagtcaaagtgaccggaatagcctcgtcaatctcttgttttgatttaaacaggaccatagttttcttatgcgatgttaaatgcggctgaatatcatcgttaagatgtttaccagccggaatcacactgttctgtacaaaaagaatagaggcagaaagctccccaccgagatcgcttggaaaatcgttgttattaaatgtaataacgttttttttgtcggtcgttgtcttttccatttttaataccttatttaattgatgttttttttcacagagtaatagtcttgggccaatatctacccttcccatccacagatattaacttgcgtattatcatctactgccagttaattccgcggcatcaagtaaattgcataacaccagatagaattagactgaactgattgctgcggcattccctagcagataaataaattaattttattattaattgtaaataataaactccttatcatttcgcttgggagttaacagcctactccaataaatccgataatatgatttaattgtctttctcagttaaaaaataactgagcgagtgtaacttacaaataaacattgagtgcagtcagaaattatcggggtaaataagaatatgacttctcaactccattaattttgatgggatgatttgcatacggctagaacaacaaaaattgttctctgaaaccaagcaaaaagactcacgtataattgggtgttggctggccggatgctctgataaatgtttatctcgtctttgataaaatttattatcactatcgcgctatttacgctaaagagattctaaaagataccgataagtcatagtgtagcttacatggcgtcgccttaggcgctcgttttttattcgacctgagcaggccttaagaatggaacaggtgttaccctcaacgatagaactaacgcccagatcggagaagatagtgccttattctgctcatgcgcaattatcaacgcgaaacagggatagcacagaaagtaacttgctgataacagaaaaaatcgacaacaaagattctggctatttgacgtggcagaaatcgatcggtgattcactgagtgacctttaccagttatctgatgctcagacaaaacaaattcaagaacaaaatgagcagcatagattgcgtattcacgcgctgtggcaagatatggaaagtcatatttttcaacataatagagaatacagccagcaattattgtcctatcaggataaagtgcaaaaatcgctaattgaatttgcccaacaaaaccagtgtgatgctcaaaattacaatacaaagatggctgaagcgttagaaatacgatttagtcggttaaaccgtcaattggaattaagtaatctggctttggataaacaaattagccaacagcatcgtattaccagaaaaatgacgctggcattaggcctgaatattctattttcatttatgttactgatgacatttttttatcaacatctcggctggttaaccatgcagtaattcaatattagaacagaaatggcccatataaatatgagccttttttatcaattttgtcttagcattaattccgcagttcgcgtaagtcaaaacgaacaggaatagtaatgctgatttcttttcgattagccattatttcctccggcgctggcggtaaaggttgcgcacgcttaggcagagccaaagcttcattatccaacgagtcaacgccgctgcttttcattaagcgagtcgctgaaaccagccctgctttatccagcgtaacgcgtaccagcacgataccctgccgactctggcgcaccgcaatgggcgggtaacgcttatggcggctaaggtgtcccagcattaggctactccagtcaggtatgccttgggtctgcgcaaaactgtcactggtgtaaggcgcggcgatacgttgctctgctgcgctcggaggcgcgctggttgcttcggctgacggcgtagtacttggtaacgagtccagtgagggcgcattatcgttttgcgtttcacgacgctgacttaccggtttcggtttttctatgaccttatttttcgctgccaatattgcgggcttcatcgcttccggcgctgccggctgcacgctttcctgccgttccgtttctgatttcacgctggattccggcgcagatagcactttgggcggccccatagggacatcatttggcgcggggacggattctattttgtctgccaataccagcatcaacgccggtggcggcgcggcggtaaccgaatccgcagcaacataatgataagccagccagcagatcaggccgccgtgtaacagtaaagccagaacggtgctaccactccaacgaacacgctcccggccacgcataggcatcatggcaatatctgacggcgccgacaggctatttttagtggtttgcattgttttcctgcttgggtaagaaaggataacgaggtaactacaaagaaggtcacttgagttggctatttgggcagtaaaaaaataaaaacagtataaacattggtagattagttattcgtcagcataattcatcgaatatctatctgaacccaataacgagagaaatatttgacctgaactggcaagacatcgggtaacgctttaagaatgcggtcagtatccgccaaagggaaaacccccgacaaacgcagactggaggcttccggctgacaacgcactacgccggaacgatagcggcttagttcggcaagaaaatcactgagtttctgattgtcgactaataattgcccctttacccaagcgcttttttctcgtattaacggcttcaccccgcatccagatgcggacagccaaccaccctgcccagccgggatagtcaggctctgcctaagagaccgcggtgataaccttaccgccccctgataaacatccacctcactctgcgttccctttaagtaaacgctaaatcgtgttcctatcgccacaatacggccctgtggcgtttccaggctcagcggacggggaaaatgcgcctgctgttccaactggccactttccaccatcacttccccccgaattagcacaatctggcgagccacatcgctgtaacgcacattaaccgccgtttgagtattgagctgtaggtgcgtgccatcttctagcgtcagacttttttgttcgccaatatcggtgtgatagtcagcctgccaagatagccagcccctagagtgaccacccagaatcacccctccgccggtgatacagctggcggccagtaacttcaatacgccccgccgattggttttccccaatttggttttccccaatatagataaagtgctgtgggctgcctgaacgttgaggcgactaaaatcggcgcaacaagactcaatatgccgccacgcccgctcattatccggatgctgattacgccaatgtaaccacgcctgccgatcctgttccgtcgccgcatcgtccattaaatgcgtcagccagaaaaccgcctcccgcgcgctttcgctggcaataggcacgccttgggcatcctgaatcgtcggattattcattgggggcatggtcatttcagcagctattcatatagggagatgtttacttaagacggcagtcatctaagaagatagcgcgaaaaaacactgaagattagcgcgctgtaggtactgtttaaccgaactggcagaaacccgcagacgttcagcaatatcgctgtagcgcataccctgtaagtgagccaacaggaaggcttccctcacctgcggcggtaaaccatcgagcgcggcatccagtttttccagaatttccaaggttaatagacgagtttcaggcgatggcgtaaccacttcgggtaatgcactgagagccgagagataagcatcttcaatcgttttgcgacgatagtgattagccaccagacgccgcgccacggtggctaaaaagggacggggctgacgaattgcctgcgcatcgggattaatcaggatattcaggaaggtatcttgcgtgagatctgccgcatgttgcggacatcccactttgttgcgcaaccagtgataaagccaaccgtgatgttcgaagtaaagtcgctgggcaaaaccatgcgcactggctgatgtctccctcatcgtcaattttaaccccgaaaattacagctcacttgaatgataatgattattatttatattttcattattctatgtcaagttattactcgcagtgagtcttatttttatagcaaaccgcttatttctcccttttggtttcccgtcgtagtccctgtctatatggcaaaaaaacggcatccgccaaggatgccgctgtttgagctagcgttggtcttagaatcgttgagaaacgctcagctttatattacgaccaacgccagagaccgactcgccaaggtacgggtaatactcagtgttaaacagattatcaaccgccacccgtgcttcaaatccatccagcgaagctggctgccagctggcaaacaaaccgtgcaatacgtaacctttggttttcggtaatgaccagatatccgctttaggatcgccatctgacggagaacggtcctgcttccgcacgaaatcccctttccagccgaatgccatgtcccattcaggcattttaacccctagcatggcatgtgccgcagtcggtggaatttctgcaatccaggtgcggttgccccaagggtcgcgcggcgaagcatctctttccccacgaatggtggaataagacaagttgccgaaaattcgctcactatcatagaaggtttcaatttctaacccttcgatggtatagcccggtaaattgcggtaattggaaagtgtcccactacaggaagacgaactaccgctgacagattgggcgtcacacagcacgccgcggcgatagaagatttcgtttttaccccggttacggaacaaggtagttcgaatttgcagactgtcctgtttcgtcatcagatcgttaaaatcgaggattgcgcccatgcgaatcccggtgatggtctccacatccagattgcgactggtgcccggtatgctggacgccccagactgcacctcgtactgctcatccaccaccggcgcgcgccaggtgcggctgatgtcagagaacaatgacagattctgcgttgccttccacatcacccccaaatgcggagaccagccggtgtaagtcacacgactgtagtcgtgaccggccgctggatcgcggtcattaaaacgcggagcgaagttcggctgcccggtattggtcacgtgatcgtatcgcacacccggcgtgacggtcaggctccccaacgtcagcgcatcttgcagatagaggctgcgggtttcctgctctcccgctggcatataataaggctggaaatagccatagttatagctcgggttatttttttgagctggatagtacatcaaggtgtcgcgttcgtgtttatgccagcgcgtccccaccgtcaacacatgttccagcacaccagtgctaaagctgctttcattgttgatatccaacatgttgtctttataactgacccagctttcattacccaaactgccgaggaaactggtagatgccgttttcggccgctgatcgtattgtttggtgctggaattggcataagtcacggtcatattcagtaacgggttatcttccggagaaatattccattttaccgagtagttgctgtccacctgatcccgtaacaccagcttacgtcgccaggcttcttcatagccatatttcttgatatctgcggctgatggggacggcatatcgtcacgtttggcggcaaaaggctgccagccatcggattccgaacgcatcgccgataaggttagagtctgagaatctgtcagataaatattggtcttgagtaaataagaggcctgatcgttagtggagtaggcaaatcgcgtgccgtccgggcggcggatattatctccgtcacgtttactcatatagattaagccgtcggccagcccgttttccgtgcgaccgtataaagcagaactatagatattctgtctatcattagtgtggtaactgtatttcagcaggccaccgaagttttcacccggtttaagcatatcaccggcgtctttggtttcgattttcaccgtcccgccaaagcccccgttaccattcagcagattgtgagggcctttatccacatcaatacgcttaatcagctccggctcaataaataccgaaccctgtcgatatttttcgaatccttttggcgcaccatcgagggtgatttttacatcttccatgtcgcccatgccccagatattcaggctttgcccgccgggacgtggcgatccagccatagaaacaccgggtaaacggtcaattaaactggccagattatccgcctgcgctcgggcgatatcttcctgacgcaaggtggaacgccctgcctgtaagctgtttgccattccaccaatcaccgacagctccggcatggtaatgctgtcatcggaaagccacgcctgcggaacttccatcaaccggtaaccattcggcgttttgaccgcctgtagcccgcttcccgccaagagttgtgcaaacgcctccgacaaactttgcgcgttattcacgctagcagcggttttgttctgagtctgctcggcggtgaaagtcagaataatgttagccttgctagctaaggtctgtaaggccgcggtcaacgatcctcccggaatgctgtactgcgtcgtccccgcgctaacatgctgatccgatattttttcctgagccatcagttgacccggcagactaatacctaacgacagtagaccggataaagcgtagctgacagggcgagcggcgcgatgagatgatagttgctggtgaataaaatgcgctttcttaactgccatggaaatatgctgtgatttcccgctattttttatagtcataacgttccctgagtgcattgatatgaaaactcatcagagaggtcacgcgagaataaaaatcgggcagaaaaaaaacataattgtatatatcgtcgtttagcctgagcaatcgcccccacgcaggcgactggttttcaagtataaacagccgctgtacaaacggttacacgccgaaaccaatgactcacggatcttcccatcagcattccctacactctttttaacggcccaatcgagccgcccctaaacagaatgccgaggaaacacccatgaaaaaattattagccttagttgttgctgctactctgggcttgtcttctgcggctttcgccgctgacaccactgccgctgcaccagcaaccgctgccactcataacaccacggtaaaaatggctcatgaaaaacacgccaaaaaagccgtgaagaaaaccgagcaaaaagcacaggctgctaaaaaacaccataaagccgtaaccaaagcgccagcgcagaaagcgcaggccgccaaaaaacaccacaaaaccgtaaccaaagcgccagcgcagaaagcgcaggccgccaaaaaacatcataaaagcacggtaaaagcggcaccagcggctaaataactgaccgaatgtaacgaagtcacacctgactcgctcaacacccggttataccgggtgttttttatcgggggtcgtcaccatgctgcgtcgctacctattcgaaatcatcctgaccgctctgattctgtgcggtctgattacccttagtttttacttataattctaattaagccatcacacgaaaatatcgaaaaatcaattgctgaacagcccgacagggtgaattatgtctatagttaccggtagcaatattcctaattttgccggaatcagcggtttttttgagtgttaatggatgacctttgcaaggcagattatttatgcgcttatcatcactactactgttgagtctgttacctttttccgtctccatggcctacgccgactccccagaaacggccagcgccaaagatcaaaacacgttattcttcggaaaagacgatcgaacagaggtgaccaacggcgcggattggccgtggcaggcaattggacaaattgaaacggcgagcggcaacttatgtaccgcaacgcttatttcccctcacctggttctgaccgcaggccattgcgtactggctcctccaggaaaaatggataaagctattgctttacgttttatttcccacaatcagaaatgggcatatcaaaccgggaagctggaaaccttagttgaccctaaactgggcaagcgcttgaaaccggacggtgaaggctggatcgttccacctgctgcggcggcctatgattttgctcttattcggttaaccagttcaaaatccttacccattaaacccttacctctttggcaaggcacatcagcagagctaacgcaggcactcaaacaggctaagcgacaggtaactcaggcgggttatccgctggatcatctggatagtctgtacagtcatgaaaactgtctgattactggctgggcacagcaaggcgtcctatcccatcagtgtgatactttgcccggcgacagtggttccccgcttttactcaaaggcccggaaggctggtcgctgattgcaatccaaagctcggcccctgcggctaaagaccgttatctggcggataatcgcgcgctggccgttacggctatcagagaaaagctaaatctgctgagcaaaaagtctaaagataagtaaatattcttcgctgaattgacgagtgaatagccggcgtgctcatcagagcacgccttcttccttccttctcctgctagtcctgggcttcatttaaatagcaaaaataaagtcatcaaccttgctttggattttctcttttactctctggctaatggcggcgtagcttctttcatgcagtgttgctgtcgtcatataaacatgaatatcgccaacaatcccctgcgtagaaaatttctggctaagtaaatggcctttcactgtctcggcggtggtgaaaaacaggcaaagcgtggaaataacattcagatccgacacaaaattcacctgtagcttcactcgggtgacagtgccggaaaaaggttcacgtataaaatcatcggaatctgtttcagcgaaagttccagcgtgataaacctcgattgcctcctcagtgaatggcttctcaagtaataattccattccactggcgacgaaacgccaggcatctggcggcaccatctctttaaaaaaaatcgctcatcatgtctttgagcactagttctgcgccgatcttatcgggtcgatatctatcagattgtacgtcagagaactgccagaagatcgattccaatatttgcacatagttcacaaaccaacttttggatgacaagaatcgcgatgttttttcatctgcgtttaattgcgctaagaagtaggagtaaagcgagttttgtcggaataaattattcgtttcaggatgaaagacaaataaactgccgtaatccacatacacgtccgattgatagaaactcatacacacctcgcttggcatgaattgaatagcattacaggggtgttctgacggtcactcatctataaacatagatgaaaagcgttattaatataaaaaaatttttatattaatattcattgtccgaatcaacttccaacaaacgctgaccttcgaataaatatctttacagccctcacaaagcgggcgcaaccaattataattaaaggaaaatttaaataaaaaccatgagcaaaatcaattatcgcaaagaatgcaccagcctataataagaataacattcaaataattattgatattaaaattaatgaacttataattcattcactatcttactccacagtaactattaaattaaaacttagagcaacaattaatatttatagttaaatattatttattaataatagttttcataaagaatctcattaatatacgtttaattatattgataaaagcaaagtaatagattctgtatctttcctcaccgttgtttctgagtctaacgagataccaccgcgcgatcgccgcgtacaacggcggactgcacggtgatagccgatcaagactgggcggaaagttgctcgatagtttgcaggatacgtttatccgaaaccggataagcggtacccaattgttgagcaaacagactcacccgcaactcctcgatcatccaacgcacttccttcacatcatcatcctgcgcacgtttcggcggcagtttatgtagccactgctgccaaacctgctgcacctgctcaacccgctgcatttgagcgcgatcgcgatgaggatccaccgccagtttttccaaccttcgctcaatcgcatgcaggtaacgcagcgtatctggcaggcgtttccagccgttgtttgtgacaaaacctcgataaatcaggccggaaagctgcgttttaatatcagaaagcgccaacgcctgcgcgatatcaacacgccctttcaaacgtttgttgatactgaataccgtcgtcaggatttgctctacctgcttggcaatctcaaccacggtatcattcagttccgcccgaacactctcctgtaagcggctaaactcctccgctttccataccggcccgccgtactgagccaccagtttgtctacgccgcaggcaatacaatcgtcaataagatccagtacgttgccataactgttgaaatacagccctaatttggatttattcggcagtttttcatgtaagtacttaattggcgacggaatatttagcaaaagaagacgccgtgtgccctgccacatggcttgctgttgctgagtttcagtttcaaataaacgaatggctacgctgtctttttcatccactaacgccggataagccttcacttcataaccaccgcgacgctgttcatagcaggttggcaaatcgccaaagctccagatatgcagatcgttttgctccaaaccatcgtcagccacggcggacaaggtttcctgcactttttcctgcaactggattttaagcgcagccagatccttaccttctcgcagcgggcgatttttatcgtcaacaatacggaaagtcatgcgtaaatggtcaggcacctgatcccactgccagctctcacgtgacaccgtcacgccagtcatgcgccgcaactcccgctccagcgaatccaaaagcccggtttccagtggcgtggcgcgagccagaaaggcctctgcgtaattaggagcaggaacaaaattccgtcgcaccggtttcggcagggatttaatcagcgcgataaccaattcccgacgtatccccggaatttgccagtcgaagccttgctcttgaatctgattcagaatgggcaaaggaatatgtaccgtcaccccatcggcatcagcgcccggctcaaactggtaggaaatacgaagctttaggctaccctgataccaaaaattaggataatccaatggattaactttgttggcaccatccttaatcagcatggttttttcgaagttcagcagctcaggctgtgcctgactcgctttcttccaccagctatcaaaatggcgcgctgagaccacatcacgaccgatacgctgatcgtaaaagttaaacagtgtgtcatcgtccaccagaatatcccggcgacgggacttgtgttctaactcttccacttcggccaacagtttcagattttcacggaaaaaagcgtggcgcgtctgccaatcaccttccaccagaccgtggcggataaacagttcacggcacagcggtggatcgattaagccatagttaatcttacgcgccgcgacaatcggcagaccaaacagcgtcactttctcactggccatcaccgcaccctgagctttctcccagtgtggttcgctatagtgatgtttgaccagatgctgtgccagcggctcaatccattccggttcgatgcgtgcggcaattcgcccccacaggcgactggtttccaccagctccgcgaccatgacccatttcggcggtttcttgaataaacccgagcctgggaagatagcaaaacgggcgttgcgagcgccggtatactcttgtttatcagcatctttctgcccgacatgggaaagcaatcccgtcaacaatgcagtatgtacgctgcgataatccgaaggctcactattcaccggcagccccaactctctcacgacctgacgcagctgggtataaatatcctgccattcccgaacccgcagataattcaaataatcgctgcggcaaagtttacggaactgcgccgatgacaactctttctgctgttccttgaggtaatcccaaagattaacaaaggccagaaaatctgattctttatctgcaaaacggcgatgtttctcatctgacgcttgctgcttatccatcggccgctcacgcggatcttgaattgacagcgcggcggtaataatcatgacttcgcgcacacagccgtttttctgggcttgtaataccatgcgagctaagcgcggatctactggtaactgagccaattggcggcccaaaggcgtaagttgctgatgcccgttatttgcagtttggatcgcccctaactcttccagcaagcgtacgccgtcctgaatgttgcgtttatccggcgcttcgacgaatgggaatgcggcgatatcccccagccctagggaggtcatttgcagaataactgacgccagattggtgcgcagaatctccggatcggtaaattcgggacgagacaggaaatcctgctccgaatacaagcgaatacaaataccgtcggacacccgtccacagcgccctttacgttgattagccgaggcttgagaaatcggctcaattggcaagcgctgcactttggtacggaaactgtagcggctgatccgggcagttccgggatcgataacgtatttaatccccggcaccgtcaatgaagtttccgcgacgttggtagccagcacaatgcgccgcccgtggtgggattggaataccctattctgttcactgttggacaaacgcgcatacagcggcagcacttcggtatgaggcagattcagcttagtgagcgcgtcggcggtatcacgaatttcccgttccccgctcataaagatcagaatatcgcctgggctctctcgacccagttcgtccaccgcatcaaaaatagcctgtagctgatcccgctccacgtcatcggcatcatccaccacggggcgatatcgcacttccaccggataagtacggccggaaacctcgataataggtgcgttgttgaaatgacgagagaaacgctgcggatcgatagtcgcagaggtaatgataaccttaagttcaggacgtttcggtaagagttcacgcagataacccagaataaaatcaatgttcagactgcgttcatgcgcttcatcaataatcagcgtgtcatactgcattaacagtcgatcttgctgaatttcagccagcaagatgccgtcggtcatcagtttaaccagggtattctcacccacttgatcgttaaacctaaccttataaccgacgcaaccgccgagagtagaatccagttcatcggcaatacggttcgccacggtgcgagcagccaaacgcctcggctgagtatgaccaatcacgcctttcacaccgcgtcccagttccagacagattttaggaatctgcgtggttttacccgaaccggtttcccctgccacgatcaccacttgatgatcgcgaatagcattataaatatctgcctttttctggcttaccggcaggttttccgggtaattaatcgtcggacacgcggctctacggctggcaacccgctgcgcggcaacggcaatgtcattctcgagtttatcgagaatcggttgcaggtcctgcgggttagtgattttgcgtgcgccttgcagacgacgacgcagccgttgctggtcgcggagcatcaactcgccaagctgggcggataatgcggcgagagaagatttcacgttcggtattccttgttacatcggccttggctctgggcggaggcatgattttcttagactatattgcgagacatggtaacacaatccgcttttccgccctatattccgcgggttgtagccttccgcaaattttattcaataaaatcgaacaaagaacgcaaaatattgcgctatccctactagaaaaatatgaatacagtgtattccattgaaagggtatcccccttatatcactgttacctattaaggaattcccatgagtaaagttctggttcttaaatcaagcattctggcaacgcactcacagtccaaccaactggccgatttttttgttgaagaatggaaatctgctcacgccggcgaccaaattaccgtgcgcgatctggcagctcagccgattcctgttttagacggtgaactggttggcgcacttcgtccttctgatgcaggtctgactccgcgtcagcaagaagctctggctctttccgacgagctgatcgccgagttacaaggccatgacgtgatcgttattgccgctccaatgtacaacttcaacattcctactcagttgaagaactatttcgatctgattgcccgcgctggcgtgacattccgttataccgaaaaaggccctgaaggcctggtcacgggcaaacgtgccattatcctgaccagccgcggcggtattcataaagataccccaaccgatcttattgttccttacctgcgtctgttcctgggtttcatcggtattaccgatgtggaattcgtattcgccgaaggtatcgcttacgggcctgaaatcgcaaccaaagcacagacagcagccaaagaaatgttagttcaggtagttacggcttaattccgccctatagaggcagaattttgctaggccctcgtcatacccattagtgttatatgtcattgcgcaccgtcgggtgcgcttttttagctctggcagtctacgggcgtaatgtttccctcattgagtccgtgtctaacaacatcatcgtacttttactttattcatcagtcgccagcccattaacccattgcccttttagcgctgcttttattgcctgatgtttttcgtgtcccccggcaatagcaataaccgttttttgcggcttgacgtgcaaagtgacgctggtcaggtaattaccttctcaacgctgcatccactggccgttaattccccgcacaaattcccccggctgagcacgactcaccaacttttgccctgcaagtttggccacttcatcggttgttacgtggttatttttggccacttcctgatacttttcttctctcgccgcattaatctgcgccaccagcgccagcgtttcggcatctttctttaccggtgccaggtagccactaagcgtttcccccactcgtccctgctgcttggcctgatctaatgtcagcgcccaagcgccagggctaaacaataaactgcttaataccagactaaggccaacccaccatttcgtttgctttttcatgttggctcctagaacagttcagattgatttttcaataaattctctacgtctttatcgactttgatgcgaatttcatgctctatctttacgttcatattgatggtaatcggtttctctggcgtcgcaacctccagccgcacacaaccactgagtagcagcgtgcctaagacgatgattaccccatactgctttgccaacatcttcatttggttttcctcgtcgatatgcccgaccgccgcataacgctgtaattaatcaccctatctgaaaagagccctccgtgaatggaaaacctccctacacactgatagcacctgccataagctactgaattgattataaccgtaaccaagacggtttctaccgctaaccgcggctaagcaccgacaaccgaacaaatttgcgcagcgctacgcataatttacggcaaaatcttccccaacgcataaatagctttatgctgtcgccatcaaggtagaatttacgcaataccaaccacataatttgaatatggagcaatcaacatggaacctcgcatcgccacgctttccgcccccatcaccgtatctggcctacgcattcgtacccagaataacgatgaatttaatcaaaaaaccgccaaaatcaccggtctgtggtctgagtttttttccaaaaatctggcggaatgcacgccaaacaagctcgataactcaccgatttatggcatttatactgcctatgatggcggagtaaccggttattttgacgtaatggctggcgtcgcagtgaaagaaaaaacagaggacgcagactcaattgagattcaagccgggtcttatctggtttttgaggctaatgggccaatgccagcggccattattcaggcgtggggcgatgtctgggcttattttgaacagcaccctgaggtaaaacgacgttttgctaccgactatgaaacatatatcgacgcagaaagcgcgcaaatttatatcggtatactgccctagtctgtgggggaaaggaaagcccattgcaagtggctgaaacttgtaaattatgttaaatatcaaacatctaatagagttaatacattttttagcgacgagtgactaatgagcttccctgtgatttcaagcctaagcaggcgcaggcaaacacgatgcggttagcgctttcaccctagttttaacggatgcacactattttgtggcaaccttatcatctgaatctgacgccgcagcaacaggtgccgtcggcatagaaagcgtctgctccaaccattcctgcaggttgtcgccaaaacgcagactgcgccacagttgaaatacgttttcctgatgggtgtaattcaacacaatcgcacgcttcgcgtttttctgagtattgacgccgtgaattttagattgcaacgtcaactcacccagattattcagactcaccttggcataggagtgagaaatctccagatagcgcagccagtcaatcacggcaccggtggcaacgttgctttcgccaatagaatccgccagatccttttccaaacgcagagtcagtaatcctgcgttggcaatccagccgtcgcgtaccagccactgcggatcgtttagaaagagcggcaactcgccgtcgaccttgccagacatagcaaattgcttgggcttcaaaacggtaaacaaagcgcttaaatcgacctgttttaatttcagcaccgccgcatcgtgctgtggtaaacgcaatgccgacaggcttaaatgtccatccagaatatccattcccacgttactgagggttaatggttttttctcggtgtacggataagtgccctgcagatcggccgtaatattttgcatttcaaacaaattggttaaggcggcaattcgcagagtcaccggttctttagctccaagctgccactgatggtctttcaggcgataagacatcacaaaatccagaccgctcatttcgccgtccttgagccacataccgccctgtttgaccacccagtgtccaccggcggtaaaaccttgctcacgcgcggcagaaaatgcggcttgcgcataaaactcgccgtcacgcaatttgataccgagattaggggatagcaagggctgaaatacctgcaaagattgtttcggccaccaggcttcccctctcaaacgctctccgtcccaacgccctcgcaaagggattggcccaatttgctgtgccgctaaatccccctgaaactggaaatcatccggattagtgcccttaaggcgcaaattcatcaccgttgcaggaagatagcctccatcgctcaacgccacgcgtttggccgttaactgcatattgccgttgaacgccgcttgttcgccattgcgctgccacatcagcggttccgttaacgtcagtctcggtgagaatacattgaccatcccatactttatctgatcaaaaccggtagaaagctgatccaaatgaattaaagaatcttgccaacgccctttcccggcaatatcccagcgagcagccaggggaggtaaatcgcctttgccccaatagcgccattgccagataccgctatctggcaaaaagttttgcgcgctgccatccagatgcagttttacattaccccagtagcgatcccgtgcattcactatcgcctgcaaacggccgttaatcccggcggcagtcattcgtactcccgccaacggccagcgagcatcattcaagcgtaattctggcgtaatatcaccgtaagcacggagcaacgcaccgggagacaataacagcgtcgggttgagcaccgaaccgctcaatattcccggcaaagtgccattcaatatcagattggacaaattagcctgaccgctaatctggaaacgcagatcgctgtcgatcaaacttaaatgacctgggcctaatgtcagaaccgcgttgcccttgccattttgaccggaggtaattacgttgattcgagcagtaatcaccgcctgatcaaacccttcactccaatcctgtaccgtcagatttacgccgccgctcaacggctgctgagcataaggccactgccaaacgccttgattaatttggatatgtctggcggcaacctgccagggcagcgtaatcagcgctttatctccgcctcgctccgtcagggtcaactctccctgttgctgttgccaatgtaaagccaccagcaagggctgttccatataaggcgttgtgaattcgccggccagttgccctcttgtcggcaacgcgtccaatgacaagggaatacttaatgttccgcttaaccgaagcggttgaacgcttccgggaatagccaaaacaaactgctgtaaatgcagttgttgctgattatccaaagtggcgttaaaacgcaatttatcaccttggtaatcaataacctgaccagcttttgccgtagtgaatgacaacgcgccgccatactgttgccaaggggtgacagaaagattatcaatatgcaggtcgagagaagaaaggcgacgttgccagtcggccagattttgcgacgttgactctgggtcgtccgacgtcaactgactcaagcactcggtatccattgccaatgttttagtctgaattccccaacgcccttctttataagaaagtcgggtatcaccaagatcgactaacggacaggtttttgccagaaaacgcagaccatccacatgtaaggctccgtcacgccaaaccggcgtatgggctaaaatgagttggctaccggctggcaaccaatgggctgcaactttcggtaaccattgaggcaaagttttccataacgcgacgactagaatcacgctggcgaacagtagccaaccgattatttttaggcttttaatcattattggccttgttttatgaactgtgtttcctaaaccgctgcacttagcataacaaatttctgactgctgttattatgtagcataactaaatccctaagtaatatagataatacatcgggagcgccatcactcccttactctaacaaattgtatgatttattaaattctgatactttgatcacaatattttggcggagaaatcatgatgaaattagccatttacagtaccaagcagtatgaccgtaaatatcttgagttggtaaaccagaagtttggctttgaactggagtttttcgattttctgcttagcccgaaaacggcaaaaactgccgtaggctgtcaggcagtttgtctcttcgtcaacgatgacggtagccgtgaagtattaactgaattagccgatatgggcgtgaaaatactggcgctgcgttgcgctggtttcaataacgttgatttagatgcagccaaagagctgggcattaaagtggttcgcgtaccagcctattctccagaggcagtagcggagcatacagtaggcatgatgatgagcctgaatcgccgtattcaccgtgcttatcagcgtacccgcgatgccaacttctctctggaaggtttaatcggttttaatatgcatggccgtaccgccggggtgattggtaccggcaaaatcggcgtagccacaatgcgtattctgaaaggtttcggcatgaatctgctggcctacgatccttaccctagtgatcaggccttggagttaggtgcagaatatgttgatttgaaaacgttgtatgcaaaatctgacgttatttctctgcactgcccgctaacgccagaaaaccatcatctgttaaataaagatgcctttgatcagatgaaaaatggcgtcatgatcatcaataccagccgcggtgctttgattgactctacggcggctattgaagcgctgaagcagcagaaaatcggctctcttggtatggatgtgtatgaaaatgaacgagatttgttctttgaagataaatccaacgacgtgattcaggacgacgtattccgccgtctgtcttcatgtcataacgtactcttcaccggccatcaggcgttcctgaccgaagaggcgttaaccagcatttccgaaactaccatgcaaaatattcagcaactcgaccagggtttaccttgccctaacctattgaacgcataataggttgaatgccatttcgttatttatacagggtgtgttctgcgcaccctgttttatttccagttacctttgtttattgcccctgaactactcgccctcgtcgaatataagtatttccctctgctttgtgctcttgccaacggtgaaataactcaaaaaacattccccttgaccgattaagaatggctgcaattctgataagaaaactcttgttatccctcacttttatcatatagcgcggttaacaaacccagggtttggtatcatatacttaaattaatcaaggtattcgtctgtacggacgacgcaattacctcatcaggagagaacatgaaaaaaattattccattggctatcgcgggaattctattagcgggttgcggtatgaatcagagccaaaatacggctaatcaaattaccgctggggatttacagcatcataatttcgtgttggtgagcgtcgacggtcaatcgccaaaaaatcagcaaggcaatatgccgagcattgagttcggtgaaaaaatgcacatttctggcgcaatgtgtaatcgttttatgggacaaggtgagttgaaagacagcgttcttactgttaaggctttggctggcacgcgcatgatgtgcaacgatcctcagttaaaccaatgggataccttgattggcgaggttctggctagcggtgccaaagtgaccttgaataaaggcgagttaaccctgaataacggcagccacaccttggtttataccagccgcgactgggtaagctaagcctgtattgtgcctcaggtagactatggcaatcgaatttcactgccatagtcttaataacctgtaacttcagaaccgttttattagctcgccggacaggctccgcgcatcaacgcccactcttcgcagcgctttccgtcaggtaactggcacattccgatacttccaccatttagctgtttggctagcgttaatactccccccgcattagcgcagttaaccgatgccggattagacatattgacgtggtggacgctggcgctggttgcctgctgttcaggaatataatcgtcatttgagttgctgctacaggcggctaaaaataatacggcgccggcgaccaaacaagatgatgctttcattgttacgctccagagcataaacagactgtcgaaattacagaagataagcgcccgatatcatatctgagccgttccatcagcgtcgagtgactttatcaatatttgttataatttgaactcagtatatacggtacatatcagaacaattaaatgtagttgttatttacataaccagcttggaaaataaacgcggcctattgagataattattatcgtgtttgacatgcgtagtctcatcgcacaaaaaatataacgggaaaaatcatgattacagacttattgctacgaatagccttggcgggcgcactaggtggattaattggcatcgagcgtcaattacgttctaaagaagcaggcttgcgtactcatattctggtgggcattggtagcgccatgtttatgatcgtttctaaatacggttttgatgatttgctggctctggggcacgtcagctttgaccctagccgcgtggcggcacaggtggttagtggcatgggcttcctcggcgccggtacaattatgattcagaaacagatggtaaaagggctcaccaccgccgccggtatgtgggtgacggccgctattggcctggtcattgggagtggattatacgaaatcggtatttacggcacgttgatgacgctggtggttctggaagtgttccgtcaattgagcaaccgtttgatgggacatcatcattatgtgctgatacggttactgcctgaatcggtgccgacggtcttagtttctttgcagaaaatgcgtattcgccctattaatctttccgtcactcagcgagatagaaacagcgaaaatgcagactgtgaattaaccatggaagtgacattgtcaccaaaaagaagtgccgacaaaatatatcagcaattgctgactatcgagggtgtccatacgctagatattcgttgatgccctttcccccgtacggtatttcctttgttcaataaataaaggaagtaaaactgtgcgggggaatcaaaacaattaatgcattgtggttttagacagcaaattaatcaccaacactccggaaataatcaacgtcatccccaaaatcgccgcccaatccagcttttgctgatacataaaagtcgcggcaaccgagaccagaacaatccccaacccagaccagatagcataggcgatgcctaatggcatagttttaacgacctgagaaagtccccaaaaagcaataccatagccaataacgacaaaaatagacggcaccaaacgagtaaaaccttctgaagcctttaataaagtagttgcgataacttccgccacaatggccatcatcaaatacaaaaatccagtcataatctttttctcatttcaatatcagcatttgagagtaaagtatgccattctcaaatcaatgccggttaaatacacagtggaattaaccgtaattttacatgtattggccacgtcaggttgatttttctgcgacattcacatggctgtaataaatagttttctaattgtaataattattttctgcgataacttaatcccgagcctcccccacagaaatatgcctgtcagcgtcattctattatttttttcctttttttacctacacacaaacacgataagaggcaaaaaatctctctgctagactttccttataacagaagtcagggacagacagttatctccccggtctcagcatgacgagcaatgtaaaggtacaattaatgatcacaactgacggtaacagtgccgtagcctcagtggcttaccgcgccagtgaagttattgctatttatcctatcacgccaagctccacaatggctgaacaggcagacgcctggtctggcgatggtaaagttaatatctggggcgatatacccagagtcgttgaaatgcagtcggaaggcggggccattgccacggttcacggcgcattacaaaccggagcgctgtccacctcattcacctcatcccagggtttactgttaatgattccgaccctgtataagttggccggtgaattaactccattcgttttacacgttgccgctcgcaccgttgcaacccatgcgctgtcaatttttggcgatcattctgacgttatggccgttcgccagaccggttgcgcgatgctgtgcgccagtaacgtgcaggaagcacaagattttgcactgatttctcaaatggcgactctgaatagtcgcattccatttattcatttctttgatggtttccgtacctcccacgaaatcaacaaaattgtttctctcagtgacgatactttacgccaactattgccgcaaaaaggcatagatgagcaccgcagccgggcgctatcaccggatcatcctgtcgtgcgtggcacctccgctaatccggatacctatttccagtcacgagaagccaccaacccttggtacaacgcaacctatcaacatgttgccgaagctatggaagcttttgccgccgcaaccggtcgggaatataaaccatttgaatactacggccacccgcaggcggatcgcgttatcattctaatgggttcagccagtggtacctgcgaggaagtcatagacacgctgttgacgcgcggagagaaagtcggcgttctgaaagttagattattccgccctttctctgcctcacatttactgaatgtgctgcctggctcagccagtaaaatagccgttctggatcgaactaaagaacctggcgcattagccgaaccactgtatctggatgttatgaccgcgttggcggaggcctacagtcgcggtgaacgcccgactttacccaaagttattggcggacgttatggcctatcttcaaaagaattcggccccgattgcgcgttagctattttcaaggaattagcgctggatatgccgcgcccccgctttaccgtgggtatttttgacgatgtgaccggcctgtctctaccattaaccacggaaaccattccccagcgcgccacgcttgaagcgttgttctacggtttgggcagtgacggttcggtttccgccacgaaaaataacatcaaaatcattggcaatagcacttctatgtacgctcagggctattttgtctatgactccaaaaaagcaggcggtctgacggtttcccacctgcgcgttagccccacacccatcaattcagcctatctggtcagccaagcggactttgtcggctgccaccagctccagtttatcgatctctatcaaatggccgagcgcttgaagccgggaggtattttcctgttgaataccccgtttagcgccgacgatatgtggcagcgcttgccgcaggaagttcaggccgtgctgcaccagcgcaacgctcgtttttacgtgattaatgcagcgaaaattgcccgcgaatgcaaattgggcgcgcgcatcaataccgtgatgcaaatggcctttttccatttaacccagatcctgccaaccgatatggcgatgcagcaattacgggatgccattgagcgcagttatagtagcaaaggaactgaaatcgttgaacgcaactggcaggcgctggatgccaccctcgatgcgttaatagaaatcccactggaacctatcgattccagtagcccaatgcgcccaccgattgtctccgatcaggcacctgacttcgttaaaactgtcactgccaccatgctggctggtttaggcgatgccctacctgtttctgcctttccgccggatggcacctggcctgtaggtaccacccaatgggaaaaacgcaatattgcggaaaacattcctctctggcggcccgatctctgtacccagtgtaaccactgtgtggcagcctgccctcattcggctatccgagctaaagtggttcagcctgaggcgatggccggagcaccagacagtctgcaatcccttgatgtaaaagctcgggatatgcgtggtcaaaaatatgtactgcaagtcgccccggaagactgtaccggctgtaatttatgttatgaggtttgccccgccaaagatcgccagaatcctgaggttaaagcgatcaatatggagccacgtctagctcatctggccgaagaaaaatcgcactatgattttttcctcaatctgccagagatcgataaaactcaaatggaacgtatagatatccgcacttcacagttgatttctccgctgtttgagtactccggagcctgttctggctgcggcgaaacaccatatatcaagctattaacccagctgtacggtgacagactgctgattgccaacgccaccggttgttcgtccatttacggtggcaacctacctaccacgccttacaccaccaacgccgacggacgcgggcctgcctgggccaactcgctgtttgaagataacgccgagtttggtttgggtttccgcctgacggttgatcaacaccggcagcgggtattgcgcctgctaaacactctggctccgcagttgccgccagagttggttgaccagttgctcagtgaagctacgccggaagtacgtcgcctgcaagttaaccaattacgcacgttattggcgaatatcgacggtaatgacgccatacagttagccaccgatgcagactatctggtcgataaatccatctggctgataggaggcgatggttgggcctacgacattggtttcggtggcctggatcacgtactcagcctgacagagaacgtcaatgtgctggtgctggatacccaatgttactccaataccggtggccagcagtctaaagccaccccgctaggcgcagtcaccaaatttggtgagcacggtaagcgtaaggcacgtaaagatttgggcgtcagtatgatgatgtacggtcatgtttatgtcgcgcaaatctcgttgggagcccagctcaaccaaacggtaaaagccattcaggaagccgaggcctatccagggccatcgctgatcatcgcctacagcccttgcgaggagcacggctacgatctggcctacagccacgaccaaatgaaacagctgacagccaccggattctggccactttatcgcttcgatccgcgccgagccgacgagggaaaagccgctttggcactggattctcgccctccgagcagcgatctcaccgccaccttgctgaaagagcagcgtttccgccgcctcaatacgcaggaacctgaggtggccgcccagctatacgccagcgccgagaaagatctgaagaaacgctatgatttcctcagcctgctcgctggtaaggctgaaaaagcgcctacggagtaatccggcccactgaggttaattcattaagccagtcgaaccaagattgactggcttttttattggcttttgcgagatgtttcgcattagcgaaagcaatgatgtttatttcaacacatcaataacatctatctatcaatagacttgataaactcgttttaaatcaatcatacttacggttcttttgattctaactaaagcactatcatccgtttcatgtttacatttacgactgacaacttgaatcactaaaagggaataaacgtggattttgagacatataagaacaatgttatacaccacgaagttgggcactggtttgtagctaataaattaaaactaaatccgggaaatatagaaatagagataaaaaaatgccactctggattttcgcattctgctacatcgcacattgatttagcgccctcattaaagaacctggctgatgtcaaaacatatttaattaaccggatttgcgtgttatacgcaggcacagcatttcagtctgaacaagaagatagatccgcagatcaaatattagaatgtgaaggtaaagatgattattcaaaactcaatgagttatgtttcgttctcagaggcctaaaccatcctgacaatacccaaaagtgccatgagttagaccaacgtaatgagatagccatagagtgctggggcaaagtgatgaaaatacgatctcattatcataaagaaatacttaaccttactgactatatttcaaataaagtcaaagaaaccgataagaaatatacgttcacttgcaaagaaataaagcaaaagatcaaccgctagtattttgaatgacattggactgactagaacgatgaatcacacgttggcattcggcttcgcaagccttaccgtacgcgccacacctatacatatggtggttattttgtagcgcaaaccggctttgacgactgcacaaatggggcatgataacgctcgacggcttcccgagaatccgttgtatctgctcaacgcaaatgaatagtgatcaaattggtttatagaatgataaactcgcactatagaagctatgtatcaccatgccccaactgaatacgagttatgattaaatgttagaaaaacaagaaattaacaaaaaagaacagtacaacctgaataaattgcagaaaagactacgccgcaatgtgggtcaggctattgccgattttaatatgattgaggaaggcgaccgcattatggtctgcctgtctggcggcaaagacagctacaccatgctggatattttgcagaacctgcaaaaaagcgcgccaattaatttcacgctgattgcggttaatctggatcaaaaacagcctggattccccgaacatattctgccagcctatctggaaaaattgggtgtggaatacaagatcgttgaagaaaacacctacgggattgtgaaagatattattccggaaggtaaaaccacctgttcactgtgctctcgtttacgacgcggcattctttaccgcacggcgacagagctgggagcaacgaagattgcgctgggtcaccatcgtgatgacattctgcaaacgctattcctcaacatgttctacggcggcaagctgaaaggtatgccaccaaaattgatgagtgatgacggaaagcatgtggttatccgcccactggcctactgccgtgagaaagatatcgaacgttttgctgaagcgcgtgaattcccgatcattccgtgcaacctttgcggttcacaaccaaacctacagcgtcaggtcatccgcgatatgctgcgtgattgggataaacagtatccgggccgtatcgaaacgatgtttagtgccacgcaaaatgtagtgccttcacatttaaacgacggttcgctgtttgactttaaaagtattacccacggcagcgaagtgattaatggcggcgatttggctttcgatcgtgaagaattaccgatgcagccggtaggctggcagccagaagaagatgaagaaaacgggaaaccgatgattgagcgtcttaacgtggtagaaattaagtaaaaagccactagttaatgaatacgaatgctcggattcaccgtaatccgggcattttttatgcctgtcgtttttgcgcataaaaaaatgccggtgtctattcaacgccggcatcgtaacaatcaatgtgctatgcagtactacaaaattaaaaatcttacaaatatggagcacaacgcccatcgcttgacgttgcattcacctgcgagatagataatgcctgagcctggtaactcaaatgttgatattgctcaatattgaagggattagcatgtttattaccacctttttcaactatcgctatcttgctgagttataaccatttactgcgttttaaccaccaggcaacagcaagcaccaaagcaactaacatcatgcagaaagcagcaaaaccgaatcgagcttcattaccgggaataccgccgaggttgacgccaaacagcccggttaaaaaggttgtcggcagaaaaaccatggccaacagcgacatggtatacgttcggcggttcatcgcatctgccattaacgaactgatttcatctgccagcactgcggtacgagcaatactagaatctaaatcttccaatcctcgtcctaacctttcggaaatctcctgcattctgcgccgatcgtcatcattcatccacggtagccgctcgctggccagacgcgagaacacatcacgctgtggagccatatagcgccgtaaaacaatcagttgcttgcgtaatagcgccatttgcccgcgcgcgggaacctgctgctctaacaaatcatcttccagatcgatgattttatcgtgtaaatcttcgataaattcattggtgtgatcggtcaacccatcggctatctctaccaaccatctaccgctatccgttgggccagtgccactttgtagatcgttaagaacatcatctatagagtaaatccgtcgatgtcgggtagaaacaataagtttatccgtcatataaacgcggatagtcaccagctgatccgggcgggcatcggcgttaaaattgatgccacgcaaagtgatcatcgttccgtcgcccagccgcgtcacttttggccgcatactgtcgccggacaaaccatctcgcaccacttccggtagcaagggcgtattgcgtagccaatcgatactgtcctgacgggtatagtccaaatgcagccaacacggatgttgagccgttgctacggcgtctggggctatgggcgttacgccacctttaccatcgagttgatacgcgtaaaccgcgtccgaaacctgaagtgcttttccttcgacctcatccacaaccctattctcctcaatcaccgaccttcagcataggaatgattcagtctagccttaacttcttgaagtttaaagccgacaaggcacggataagccagaattggctaagcattagaggggaatgaatcggtttggcggagttgttaggataaaaaatccccgtaaccagattacagggattttatgatactgaataaactaacgatggatattcactgcaaaacgcagatcaatgtttaatgatgtacatcgtttgactgtaggctacatcttccggattggtaatcggataaccttttacccaaggcttaattaagcggccattggtatattgataaataggtgcaatcggcgcctgctcggcgagaatctgctcggctttgttataatcagcattcagcgctttggcattagtttgtttgctggtatccgccatcagtttatcgtaatccgcattattgaatttggctatattcccgctgtgactggatgttaataacgacaggaaggttgacggctcattataatccccaacccaggatgcacgcaccacgtcaaaattgccggtattgcggctatctatataagttttccattcctggttaaccagcttgacatccacgcccagttttttcttccacattgaggcgaccgcaatcgccagtttttggtggttttccgaagtgttatacaacagcgaaagttttaacggattattcgggccatagcccgccgcattcatcaacgctttcgcctgcgcatctaattcagcctgactgtgctgctgtaagaaattatccgtcggcttatatccagccgtcacgtctggggtaaagtgataagctggcttctctccggtacctaatactttttccgcaataattttacgatcgatcgcgtaagacagcgctttacgcacacgaacatcgttggttggcgcccgctgagtattaaacgcgtaataatacgtcccgagctgatccggagtataaacctgcccaggaatatcttttaacagcttctggtacatgtttttcgggaaggactcagtgatatcgatatcaccggcctgataacgtttagtcgcgttggattcctgattaatcggaataaacgtcactttggtcagcaccgtatgggcgtgatcccaataattttcattgggtaccagcaccagtttttcatttaccacgcggtcttgtaatttaaaagcaccgttaccgaccaaattacccactttagtccagttattgccatatttctcaaccgttgctttatgaactgggaacatactgaaatttgccatcaggcttacaaaataaggcactggcttactcagttgaactttaagcgtgtaattatccactgcgctaacgcccaattgatccgccggtaatttaccggcaataatctgttccgcgttatttaaaccagctaattgcgcaaaccaggcaaaaggcgacagatttttgggatcgaccaaacgctgccagctatacacaaaatcattagcagtcaccggatcgccattggaccagcgcgcgtctttacgcagcgtaaatagccagatttgattatctgaagtttgccatttctccgctacgcccggaataactttgccgttggcatcctgattcaccagcccttcaaacaaatctcgcgcgacctgcgcttccggcaaaccaaccgcttttatcggatccaaagaagcaggctcatccttaatatggcgaacaatctcttgtttatcagctaattgtgtacccggcggcacctcagcggcataggccgagccgagggatgccccgaccacagcggcacataatgcataacgaaaatattgcataattgatgaccttatcgttgttaatccatgccataaatgagccacattccactggctctgacttgtcattctcccgtcagcgaaaattcttgatgctgccaggccgggtactcaactaataaatctaacctatcattattttcaaatctattacttattagatatcaatagctaatagtgcggtttatgccaaataatcaccgaatacggcggcgtttgtatcggaagaagttaagtgataatttcatgactgccgaaccaagacatctaaagagaaccccatgacacagcttcgtccccgcccacttcgcggccatttaccaccactaggaaagctctacggcagttcgtttttaggtgccccgctgctttacttccccgctcaaacgccggcggcagataccgggctgattatcgccggtacccacggtgacgaaacggccgcggtcattacgctatcctgcgcgttacgcagcatttctaccgaacaactgcgccaccatgtgattctggcggtcaatccagacggctgtcagctcggtttacgcgccaacgccaacggggtcgatctcaaccggaattttccagctaaaaactggcaatccggcgagacggtttaccgctggaacagtgcggccaccgaacgggacgttttattatcaacaggaagcgaggcgggttcagaattggaaaccaaagcgctatgtcagattattggagaactggctccagcgtgggtcgtttccttccacgagcctttggcctgcattgaagatcctgatagttcaccgctaggtcattggttgtcagaacaatttgatctgccactcttaaccaacgtgggttatgccacgccagggtcattcggcagttggtgtgcagatatttccctgccttgtatcaccgctgagtttcccccgatttcagccgacgccgccagcgagagctatctggcagcgatgattgcccttctcaccagaccctagccttgggattaactggccaactgattaatcgcgccacaggagaaattcaatccttccgcgacgtcgctggccaaccaggttgggccatctaaatcgataaaccgagctacgggtgccaaaggtaacgcggcgcgaatagcccgcgaggtgcatagcatacagcccagcatcatttcaaaacccagggcttttgcctgctcggccagcagtaaagcctcggttaaaccaccgcttttatccagtttgatattgaccatttcatagcgtccaaccaatccctgcaaatcttcacgcgtatgacaactttcatcggcgcaaataggcagcggatgaataaaatgctgcaaagtctcgtctttatccgcaggtaatggctgttccagcatggcaacaccgaggtctgccaataattgacaacgcgcggccaagccttctggttgccaggattcattggcatcaacaattaatatagcctccggcactgcggcacgaatggccactaaccgctccgcaatcagatgatcgtccagtttgatttttaacagctttgcgccctgctgtgacagcaaacgcgcgttgtaagccatggactccggcgtaccgatactgacggtttgcgccattgagatagcatcgagagcctgggtatgactcaattgccacaagttttttcgagtcagcccgcattccagttgccataaagccgaatcaacggcgttacgcgccgcacccgccggcaataattgctgtaacgcatcgcgggaaatgccgtattcgatcgcatcggcaaccaatgccaactgcgccatcacggaagattcactttccccataacgtgggtagggagtacattcacctacgcctcgaatgccattttgctctatttcgaccaccacaaccttggcttcagtacggcttccacgcgaaataacgaacgcggtgtgtaacggccaggattctgggtaaaaacgcatcgttctcataatggctcccaagctatgtgatcgctgaacctaaggaatagcaggctaactcatcaatatatacaattgtttagagaatttcttatatgcaattgcctattgttaccttaaactgaaatccgtgttacatatctgtaaaggaatcttaaatgacacagaccgtacattttcaaggcaatcctgttgccgtagcgggtaaacttccgcaagccggcgagaaagccaaagacttcactttggtcgctaaagatctttctgccgtttctctgagagattttgccggtaaacgcaaagttctgaacatcttccccagcattgataccggtgtttgcgccgcttccgtgcgtaaattcaatcagttggctggcgagcttgagaataccgttgttctttgtatctccgctgaccttccatttgcccaatcacgcttctgcggtgctgaaggcctgagtaacgtagtgactctgtccaccctgcgtggcgctgaattcaaacaagcctatggcgttgaaattgccgaaggtccattagccgaactgaccgcccgtgccgttgtggtgctggatggcaatgacaacgtaatttacagcgaattggtgaatgaaatcactagtgagcctgattacgatgccgcattagccgcgctgaaataatagctcaacgcagatagcaaaacggctgacatcgcgtcagccgtttttttaacgataaacgttatttaacgataaatagcagccattgctgaaataccctctattcttggttcttattcttggctctcttcgttttcatccacggccgggcgacggctgccgctcaatccatattcccgcagcttattggctatcgccgtatgggaaacgcctaagcgtttcgccaatttacgcgtactcggataattacgataaaggcgggttaataccgaacgttcgaaacgcttactaatatcgtccagcgaaccgtccagcacctcatcccccaacgacatctccacttcaaattccggcagaataatgtcctgtgggcgcagttctacgccatctagctgagttaaagcccgataaatggcattcttaagctgacgaacgttacccggccagccgtagcgcgtgaggaatccgttaagttccggtgacaacttcggccgtggtacgccttgctcatcagagaaacgggcgacaaagagttccaccagcggcataatatccgttgggcgctcgcgtaatggaggcagtgtgatggtcagcacgtttaggcgataatagagatcttcgcggaattcaccgcgctgaaccaattccaccaaattcttctgcgtcgcgcagataaccctaacatccacgtggacttcatgctcttctcctacccgacggaaagtgccgtcgttgaggaaacgcagcagtttgatctgcattcgcggcgacatttcaccgatttcatccaacagaaccgagccaccgttagcctgttcaaagaatccttttttaccttccaccgcattgggataggcgcccggcgcatagccaaatagctcgctttctaccacgtcgtcaggcatcgatgcacaattcagaccgaggaaaggttttttgccgcgaggactgcgcaagtggcaagctctggccagcagatctttaccggtaccggtatcaccaattagcaacagcggcgcatccaacatcgccaatttgcgcgcctggtctaaaacctgacgcattttgctgctcacggcgacaatttgtctgaattcgctgtcatcgttaaccgacagggtttgcaattgctgccccatacgcgcggtcgatttcagcatcaccaccgcacctaccgtttggttatgctgattttcatccaccaaatgaataggtgtcacttccatcaggtaatcctgactgtgaatcagtattcgttcggtatgaggcgtggtttcttcccgctcaaaccagtgggaaaaattaaatccccccagcagcgtacccatagtcttatgacgaattttctcttcgttaaaagaaaatagctcgcgagccgccgggttagccagttcaacgttgcctttaagatcgatggaaaaaacaggctccggcatggattccagcaaggcgcgcagcgcgcggtgctcacgctcagaaggcatgaaaggaacggtgcgcacgtcggtaaccccgtcgatacgccgaatttccgccatcagcgcctgaaacacggcaaaatccagtttggagaaattcagataaatacggccgataggatcaatttcgatcccccgtaaatcaatgctgcgtaaaaccaggagatcgagtaactctctggtgagacctatccggtcttcgcaaaacacttccaagcgcatcagtattgaccttatctttgcggtacgggatgactaagtttgataataccctgtcccttcgccctgatgaagagatctgtcagcaaaagttgacaggaatcctctttttcgtttcatttgtcttcatttggtcttttttatagcgatatgaaggcattatccccgtcgttgttgaagaatctcagggtgatattatcttcaaaatcaattatgcagatgaatataatatattcgtagaagcggccgtcctgtcaagcacaggtgacactttgcaatcaatacgccaactggctatagtaaaggtagccagttgaccgaggaggttgcatgagaagttaccacccaagcccgaccactagagtcagcgcgttatggcgtgaaatcgggctgcccgccagccgcggcaccgcgttggtagacagtattaagctcggtttttccgtcgacgttattgatacgatccatctgtgggcagcgatgccaaaggccgaaatcttgcgtgccaccggtattcccagccgcagcctgacacgccgtcgcactaatgatggacgatttactccagaagaaagtgaacgtattgctcgttttgtccgagttatggacgcggcggtagatttgttcggcggagatcgccccaaggccacggcatggatgtcaacgcctgtgagaggtttgggcaatcgcactcccgattccctgctggaaaccgaaaccggagcgttggaaatatgtgacctgattggtcgattggaacatggcgtctttacgtaatggagctacagttttgatgctataccggattgtccataatcgttttgccgctacggcctggtcgggttatggagcggaaacctacggtggtcgctggaatcataaaggccacagcgcgatttatctggccagcagtatttctctagcaatgttggaaacactggttcatgttgaagatagcgccactctgaacgattttaatctgtttcaaatcgcgattccggataacgctattatggccttgcaacaggaagattggcctcgaggatggcgagacgatccggctccggtggcgacgatggatatcggcacggaatggttaagctcagtttcctccgtgggattactggttccatctacgttggtgccgctggagagaaatgtgctggttaatcccaaacatcgtgatttccccccttgtctcaccagcgtcaccccactcgacttcagtttcgacccgcgcctcaaatagcccgaaataaatggccttagcgctgtttgtctttcttaggcagcgtattcttcagctgcgtaatcaattgacgacggaaatcccccagttttggcttatcatcatccatccagggcagcgggcgacataactccatcgctttgatccccaaacgcgcggtgagtaaacccgcaccgattccctgcgccgcccgagcggataaacgcgcggccagatcctgcgatagccagtccataccgacttcccgcactaattccgacgcaccggcaaaggcaatattcagtaaaaccaaacggaacaggcgtaaacgactgaaatagccaagttcaattccatacaacgcggcaatacgattgattaatcgaatgtttcgccaagcgataaaagccatatccaccagcgccagagggctgacggcgatcatcagcgccgattctgccgcatagcggcttatttcagatcgagcctgattatccaacgtcggttgtactaatttggcatagagttcaaccacttcccgatcgttatgcgtttcatgcagcgaggcttgccagcgctgtaacgccggatgtccctgatccaaacccgcctgacgcgccagtttctcgcagaattggcgcccacggcccaaaccgtggcttaccagtaactcccgcgccacgtcacgttcttccgcgcgctggcgcagccgatataaccgccgccattcggtaacaaccgaaccaatcccggcaaaaacgatcagtccgccggctaccgtggtgcccaaggctatccagtcctgctgctgccacgcctgattaacccactgcaccgcctgcgccacgacgctcacgccaaacagcatcagacctgccgtcaccatttttcgccatagactgcgttttggtttaagcgccgcgcttaccagaccttccgcacgcccttccgcttcgtccgcgtccagaaccggatcaaccggcaaaaaattctcggccgcggagccactaaaggtctgccccgtttttaactttggctcttcgatcggctgcaatggctgttgaaaatctatccgtggtttcaatggttcattcatcgcagtttatctcccaataaaaactccatcaccgcatccagtcggatatgcggcaatgggctatccacgtgcacttgttgtggacggaactgatcaaaatggaagccctgttgcagccaaaatgccgggccgggcaaacgtgccggaacatcgccagggaacaccgtcagcggcgcaccgtcttccagacgatgaccttttaatgccggaattcgctggccattatgatcgaccataccgctttccgtggcctgtaccgacgccagcccgacacaatccatgctgatgccttcgaacgccgcattttgccaggcctcctgcactaattgctggagcaatgacaccagattggcatgttggtccgcagttacatgatcggctttagtggcagcgaacatcagcttatcaatacagggggagaataaacgacgaaatagcgtgcgttttccataatgaaagctttgcataagctgggttaatgccagacgcatgtcgttaaaggcttgcggcccgctgttcaagggttgcaggcaatccaccaggacgatctgtcgatcaaaccgaataaagtgttctttataaaaaccttttacgattgattggcagtagtaattaaaccgcgcgcgcaacatacccaaattgctgtgtttgtctgcctgagctaaacgagactcatcaatcgcggtgatatctggccaagggaagaactgcaatgcaggcgcgccggccatatcaccggggagcacaaagcgccccggctgaataaagtgcagcccttcttgcttacagcgaatcaggtactcggtataggcctgagcaatcgcggcaagtaaattttcgtccgccggagccaaaggatcgcactgtttgcacaattccaaccacggtttagcccattcggcacggttaccctgtaacaaaccgcccatttgccgcgaccattcgaggtaatcctgctccaacatgggcaaatccagcagccattcacctgggtaatcgacgatttccagatacaaggtcgatgtctctttgaaatgacgtaaaaccgagtcattcgacctaaatttcagagccagacgaatttcactcacgccgcgagtcggcgtcggccagctcgggggcgtaccgtacaatgaggccagaccttcgtcatatctaaaacgctggatacccaaatcccgctgaggcacccgcttgacgccgagtaagcgatcttcgcgcacggcagaaaacagcggtaaacgcgccccgctgtgtacatgtaataattgattgactaacgcggtgataaacgcagttttaccgctccgactcaggccggtcaccgccagtcgcaaatggcggtccatcccgcggttaactaaagagctgatctcattttgcagtcgtttcatgcttttcctttgcaaatcggccaaataccgcacctaaaccgcgtctcaataacggttccaacaacacagccagcgcccaacgcagcggtttacggctcacgctgcgtaaaatccaggccgtggcaccggccgggccgtagcttaatgctgcggtaataatcactttaaccagcgttttcaatactacacctgaccgctgagtggcgacgttattcttcatcatttatgccctccggcaggtcatttttcgaatttcagctcggtaaaagtcataaatcagcccactggccgcatgaattaccgattcattgcgctgcggattcgttatagctgacgaaatctgctgcgaacaccaaaagtttccgaagtaacgtaacgctctacttgccgcaaacgttgctctccgctgcttaattcgtaatccagtttatccagcagttggcgaggagtttgatagtcctcatccataagagtgctggccggtactgggtccaacatataagtcagcaccaggtaggctacgatggtgaaaacaaacaggccgaaaaacatcgataacacggcaataatacgtaccagtttgaccggaatatccagataatgcgctaaaccggcgcacacccctttcaccatgccttcttccggcacgcggtacagtttttttccactaaacaaaccggtcattatgattgcctccagttcggatgttctgcatccagaatttcttccagcgcctgaatacgttcgcgcatacggcgcgcatcatcagctaactgcgctaaacgctgcatttcctgatggctaagctgggtgccgctttgttggcgattgctgtaatgtagccagagccagatcggtgcgacaaacagcacaaaaatggttagcggaatagctaaaaacagaatactcattctttccccttatttattcttatcaacggcaatgcaatcatcatagccgcaagattcgagtaataatatggccgcaaccttttgggataacggcccacttttattactctttattattctggagcattcatttttgcttttaacgccgctaactgactgctgatttcatcatcggctttcaattctgcaaactcttgttccagtgacttctttttaccgatgctgacgctttccgcttcggcttccatatgatcaattcggcgttcgaattgctcaaaacgagccattgcctcatccagcttaccgctatccaactggcgacgaacatcgcgagaagaagaggcagcctgatgacgtaaagtcagcgcttgctgtctggcgcgggtttcggtcagtttgctttccagctcgccaatctcatgtttcatgcgatccagcgtttcgtctacggtagccacttcacgctgtagggtttcgatcagggaagccactttctgtttctcaatcaaagcggcacgagccaagtcttctttatctttacgcagcgccaactcggccttttcctgccattcaaccagctggctttcacccaaatcaatccggcgcattagctgtttcttttccgccaacgcgcgagcagaggtagagcgaatttctaccagcgtatcttccatttcctgaatcatcaggcgaaccagtttttgcggatcttcggctttatctagcaacgtgttgatgttggcattcacgatatcggcaaaacgagaaaaaatacccattgttcacatcctctttaatcatgtgggcgactctatgcgccggttgttcagtgagcaagtctcaccggtacagatacagctctggctataggataatcaaaagtcatgccaactttagaaaatcaaatatcatcatgaattaaaagggaaaataactttattgctaatttcagcataaaaggtagagtgattactttaaccaactattagcgaatctcactatgagcgaacaacttgaaaacctgctaggtgaagcaaattcctttgttgaggtgcttgagcaagtctcgggattggccaaattgaataaacccgtactggtgattggcgaacgcggaacgggtaaggaattgattgctcaccgtttgcattatctgtcgaatcgttggcaggggccgtttatctcgctgaactgtgcggcgctgaatgaaaatctgctggattccgagctgtttggtcatgaagccggtgcctttaccggcgcgcaaaagcgccatttaggtcgatttgaacgcgccgatgggggaacgctgtttctcgatgaactcgctaccgccccaatgctggtacaggaaaaactgctgcgagtcattgaatatggccatttggagagagtcggcggtagccagccgttacaggttgacgtgcgtttagtttgcgccaccaatgataatttacccgctctggccgccgcaggaaagtttcgggcggatttactggatcgtctggctttcgacgtggtgcaactgccgccgctacgccagagacagcaagatatcatgctgctggcggagcatttcgctatccaaatgtgccgcgaacttgggctgcaattattccccggttttactctacaggccaaaagccagctgctgggttatcattggccgggaaacgtgcgagagctgaaaaatgtggtggagcgctcggtttatcgccacggcgatagcccggatctgctagacactataattatcaacccgtttgctgcccatcagaatacccaaccccaccttccaacggaaacggcttccctgcccgcgctccccgttgacctcaaagcctggctacaaaacggcgagaaacagttaattatgcaagcgctggagcaggcgcgtttcaatcagaggaaggcggcggatttattagggctgacctatcatcagttacggggaatgctgaaaaaacactcgatattgcaagccgccacagatgagaataacgaagaatcggcgaatgactagctagcgaccataatttttcgcttatttattttcgcttatttatatcaggcagaatgatataaaacagggctaatgacgtggaaatccgaggcataaaagatgcgaataagctgaaaagttaatcgcaagtaaaaaaaaaagccagcacccgagctggcttaaaaaacactggaagcaatgtgagcaatgtcgtgcctttctatcagaagctccctactggcggcctcttcctgaagtgcgaaacaatgataatggttatcactagcacttgtaaatacttttgttgagaatttttctcatttccacaacgatattgtggctcttcaattatcctcttcacgttatgttttaacctaatccgatacccctattctctgtctggaatcctgtctgcttcaaggtaacggccgaaatggattaacactcaaatttatcgatcgttattctgcctaagcgtagccagacacagtaacgtgaatagaatctgcgccccaagattcgccgtattactggtaggatcatactgcggcgcgacctcaacgatatctccaccaaccatgttgacgccggccaaccctcttaacatgccaaataattctcgcggcagtaacccattgacctccggcgttccggtgcccggagcaaaactgggatcgagagaatcaatatctacgctaatataaaccggcccagtccctacaacggttttcacttgctcaacgatagagtgaacgccacgctcaaaaacggcttccgcatggatcactgtcatgcctgaatcgcgagagaactcccaaaaatactcatccgggccacgaattccaacttgcaccgtgcggcaaggatctatcacaccgtctaataccgcctgacgaaacagcgaaccgtgatgctgattgccgtaaaaaagaccggcggtatcacaatgagcgtcaaaatgaatcacaccaaccggccgctctgcccccaaagcccgcaaaattggcagcgtcatggaatgatcgcctcccactgacagtggcaaaatgcctgacgctttcaggcgagatagcgtattttgtatatccaaatgggcttgcgtgaggtcaaaacggttgctaaacaccacgtcgcccagatcggcggcgctaagtaaccgagctggcgcaagattcagcacatgatcgtaaggcccgatacgttccgcaacgcgcagcgctttagggccaaaacgcgcaccagcgcgatgcgtcacgccgagatccatgggaacgcccaaaattccaacgtcggttccctgccattgatccggcgaacggaacggtaaatcgagaaaagtggaaatatggtcaaacgcccatgtagcctgcgccttagcatcagggaagaaggtttctgccacctgacgataattttcatcatgaatggtaaaagcgtcttttcccgcatacttcgcccgcaatttattgagtgagttcatatttaaccggcctcctgtttcacagcgtccgagcaggaataaaactcgaagcgatttgcggattctgccagcactgccagtaaatgctgtacctgatcgggattattggccgcggtgagctgcacgcggaaaccgacttcttttttgggtaccagcggatatagcgccagcgtgacataaactccgcgctcaaacagataactgcctaacgccataatttgccgtggatctttcagcggtatttccatgataggtaattcagaattattcaatgtaaaaatatcaagatcggctaaccctttgagcaattgtcgacacatttgatgcagatcgcgacgtaattcctctcctttttgggcgttaaccgctaaaccactcagtgttgtggccagcgaagctaccggggatggccccgaatacagataaggcgacgcggcaactttaatcatttccttcaataccgtcggcagcgccataaaagccaacaatgatgaataggatttggataaacccgccaccagcagaatattgtcgtagctcaacccacagtggcgaacgataccgttccctttatacccccacggcatttctccatcgggattttcacctatcaaaccaaaaccgtgggcgtcatccacataaaggatgacgttccagcgccgggctatctcggcaaaacgcgctaaatccggcagattgccggtcatgctattcaccccgtccatgcaaattaagcgcggcggcacggggctactagctaataatcgttctaattcatcggcatcgttatgtttaaagcgaatcagcgtagcaccttgcccctgcgccactttacaaccgtcgtaaatggttttatgggcccgactgtccagataaattgcgccagtaccgctgaggaaaggaatcactgaaagatggatatgagtgatagtcggaaaggccaatatatccggcgcttgggtcaaggccgctaactcgcgctctatatccctataaggcgtgggtgtaccaagcattctcgaccagctcggatgagtaccccattgacgcaccagaggtaatattgacgcctgaacctgcggatttagatccaaacccagatagttacaggaggcaaaatcaatcagttcacgttcgccaatcactatcttgcgtccgtcaataccctcaataacggcatcaaccatagggtgagcgggaggtgtaagtggagaatgagcgaaatgtgtgtccaaccatttcgccatccaggatgggacggtttgctgattcatcattaattcctatagtgatgcgttcagaattattcaccttgatacgatgagagtgcccactagtattgtgataaccaaaaactataggaaaggacggtaaaagcagcaattgctcaattatcgtgcaacgtaaagctagaatgacacaatgagtaatggggttataattgctgttatttccccccaatcggtataaacacaagagccgcgaacgatggcacgatttgcgatcgagctgtagccgcctctggtcactgcggccccacgtctagaatgaatcaccatgccatcctgaatgttagaatgcgcaccgatctgatctgaggtcactggccgaaaggatttttacgccgcatgattaataccctcgctactgataacggcgacggcgttgtgggcatgcaggctttcctgatgctccaccctaactgaaaatgccgaatagcggcattgcttacgcagcatggcgtacaaacggcgcgccgcgtcctcgcagaacatcagattttgtccattagccaatgcaaacgcctgctcatcctgacgtttcactaaagtttgtaccggtgttcccagcgtattttcaatttggttaattaattccagtaccggaaaattcatctcagtggatttaagtgacaccgtcactcttgcccagctgcgttgactgtgcggcgttgctggcattccctgcgttccaagccaatccagcacctgttgctgggtcagattttcctgctgttcaaaatccagttgaaactgctgctgagcagactgaatactcaacgctaccgagctgggacaagtggaagaataaggtacggacagagatagccggagccggagctgaagctgttgttcgagctgggcgtcaatcgtcagtgggtaggccttccagcctctttgcggggataacatcgccggtcgcgagataaaaatatcgctggcaatatgcaggctagcgctggcggctagatcgggttgagaagctaaaaatgcggctaacgtggtgtgaatgcgctggggcgttaattccccttgagtcaattcatctaatgccaagtatatacgggacatatgaattcccttgctctgccctttagctttgacaccaatcccggcattcacttttgcagatagcggcctgccaacgatgtctaacggtaacgcaatgccttccatgccgacccaatccagctccgtattgccaaaatcaatgtatgaagattgtacatctggtaacgccgttagcgattgattcgcagctattttcatgtcgtcctctatgtgtgctttattaatatcaaataaaggtaacatgcaattgttatagtataacatatcgaagttgcgtttttttgctctctttcggcgcttttgcgcataattacagcaatatccctgagatcagtgagttgttttgctcaatggattggggggataaccagtttacggtacactaagtctattgcttacttacagttgaagcgttttatgcgtggtttactcatttggctgctgtcgcttggctgtctagcgacaccagcgctggcacaaactcagccagccccccaagcgattcaaccgccgccggatatccgccagcggggtttcgtctattgcgtcagtggcgtgttgaatactttcaacccacagatggccagcggtggcttaaccatcgatacgttagcggcacagctttacgatcgcctgctagacgttgacccttatacctatcgtttggtgccggagcttgctgatagctggcaagtactggacaacggtgctacttaccgtttccatttgcgtaaagatgtgcctttccaaaccaccgagtggtttaagccgacgcgcatgatgaacgccgacgacgttgtctttagcttccaacgggtatttgaccaaaaccatccgtaccacaacgttaacggcggggattatccctactttgatagcctgcaatttgccgacgcagtacagagcgtgaaaaaactggatgattacacggtagaattccgcctaaaagcgccagatgcctctttcctgtggcatttagccacccattacgcgccggtgctttccgctgaatacggcgatatgctggctgccaaaggcaaaaaagagcagattgaccgcgaacccttaggtaccggaccatttatgctcaatgagtatcgttctggtcaatatattcggctttctcgaaacagtaattattggaagggcttgccgcgtatgccgcaggtcattatcgatctgggcgctggtggcaccggtcgcttgtctaaattactgaccggcgaatgtgacgtactggcctatccggcggccagtcagttgtccattttgcgagatgacccgcgtttacgcctgacactgcgaccgggcatgaatatcgcctatttggcatttaatacccgtaaaccgccgttgaacgatgaacgcgttcgtcaggccgtcgctttgtcgattaataatcaacggctgatgcagtcgatttattacggcaccgcagaaaccgccgcatcgattctgccgcgcgcctcctgggcttacgataaccacgcgcaggtaaccgaatacaatcccggcaaagccagagaaatactgaaagagttggggatcaaacagttacagctgaatctgtgggtgccaactgcttcgcagtcttataatcccagcccgttaaaaaccgccgaactgatacaggcggatttggcgcaggttggcattactgtgaatatcgtgccggtggagggacgttttcaggaagcgcggttgatggaaatgaaccatgacctcacgctcaccgggtggtcaacggacagtaatgatcccgacagtttcttccgcccgttattaagctgcgctgcaatacgctcgcaaaccaactatgctcactggtgtgacccagctttcgatgaattactgcaaaaagctctgcgatcgcagcagatatcggaacgcattgactattaccaacaggcgcagcgcattttggagcaacagttgccactgctgcctctggcttcctccttgcggctacaggcgtatcgttacgacatcaaaggtctggtgctcagtccctttggcaatgcgtcctttgccggggtgttccgcgaaagtgacgagggtaaaaaaccatgattatctttaccttacgtcgcctgttgttattagttatcacgctaatcatgctgtcgctggtgagttttagtctgagctattttacgccccacggcccattgagcggcgcttccctgttcgatgcctaccgtttttatttgcatagcctgatgcaatgggattttggcgtttccagcattaacggccagccgattagcgaacagctgcgggaagcttttcccgccacgatggaactctgcgtattagcattcagcctcgcgctattcatcggtattcctttgggtattattgccggtgtaatgcgaggaaaatggccggatgtcgctatcagttctctggcactgatcggtttttccatccccgtattctggctggcgctgctgctgatgctttttttctctctgcatctgggctggctgccggtctccgggcgtttcgatctgttatatcaggtcaaacccgtgactgggctggcactggtagatgcctggctatccaattccccttatcgcaaggaaatgatatatagcgccttgcagcatatgatcctgccgataaccgcgctggccgtggcgccaaccacggaagtcattcgtttgatgcgcatcagtaccgatgatgtgatagggcaaaattatatcaaagccgctgcgacccgcgggctgtcgcggctgaccattattcgtcgtcatgtgctgcacaacgccctgccgccgattattcccaaattgggcttgcagttctccaccatgttgacgctggctatgattaccgaagtggtattcagctggccggggctgggacgctggttgattaacgccatccgtcagcaagattatgcggcgatttctgctggcgtaatggtggtgggaacgttggtgatcgtgattaacgtgttgtcggatattttgggggcgatgatgagcccgttaaagcataaggaatggtatgcccttcgataatgtctaccgcgaaaagaaaatgcctagccccctgctgtatacctggcgcattttctacgccgacactttggcaatgaccggattttatggggttattgccctgattttgctgtgcctgtttggcaatatgctggcaccctatgctttggatcagcaatttctcggctatcaattgctaccgccgtcctggtctcgctacgggaatgtttccttcttcctcggcaccgacgatctcggccgcgatattcttagccgtttattgaccggcgcagcctccacctatggttcagcgctgctagtgaccgttgccgccgccctgtgcggcgtggtgttaggcgtgctggcgggcgtcactcacggttttcgctccgcgattttgaatcatatattagataccctgctttctattccgtctctactgctggcgatcattgtggtggccttcgttggcccaagcctgcaacacgccatgtttgcggtctggttagcattgctgccgagaatggttagaacgatttacagcgcagttcatgatgagctggataaagaatacgtggttgcggcgcggctggacggcgcttcaacgccttatattttgctgtatgccattttccccaatattgccgccgtgctggtgaccgagtttacccgcgccctctcgatggcgattctggatattgccgctctgggctttttggatctcggcgcgcagttaccttcgccagaatggggcgccatgctgggggattcgctggatttggtctacgttgcaccttggaccgtgatgttaccgggcgcggcgattttggtgagtgtgctattggttaacctgttaggtgacggtatgcgccgggcgattatcgagggagtggaataatgccgttactggatatccgcaatctcactattgaatttatgaccgccgaagggccggtaaaagccgtcgatcgcgtcagcatgaccttgacagaaggcgaagttcgcggcttagtcggcgaatcaggatcgggaaaaagcttgattgccaaagcaatttgcggcgtgagcaaagataattggcgaatcaccgccgaccgcttccgctttgatgatatcgacttgctccagctcagcccacaccaacggcgtaaggtgatcggccataatatttcgatgatttttcaagaaccacagtcctgcctggatccttcggaaaatatcggtaagcagctcattcaggccattccgggttggacctataaaggccgctggtggcaacgatttcattggcgtaaacgccgggctatcgagctgttacaccgcgtcggaattaaagatcacaaagacattatgcgcagttatccctacgaattaaccgaaggggaatgccaaaaagtgatgatttctattgcgctggccaatcagccacggttattgattgccgatgagccgaccaacgccatggaacccactacgcaggcgcagattttccgattgctggcacgattgaatcagaataacaacacgaccattttgctgatcagtcatgatttacaaatgatgagtaaatgggcaaaccgggtaaacgtactttactgtgggcaaacggtggaaagtgcagtctgcgaagaattactggccgccccgcaccatccttatactcaggcgctgatccgcgccatgccggattttggccgctctttgccccataaaagccgtttgaataccttgcccggcgcgattccctcgctggaacatctgcctatcggctgccgcttggggccgcgttgcccttacgcgcaaaaaacctgtattgaaaccccgcgtctgcggatggcaaaaactcacgcctatgcctgccacttcccactgaatctggaggaaccgtgatgaccgaaaccttgcttgaagtgcgcaatctgagcaaaaccttccgctatcgcaccggcctgtttcgtcgtcaacacgttgaagcggtgaaatccgtcagttttaccctgcgggaaggccagacgctggcggtcatcggtgagaacggctccggtaaatctacgctggcgaaaatgctgtccggtatgattgaaccaaccgaaggcgagctgctcatcgacgatcatcgattaagctacggtgattacgcttatcgtagccaacgaattcgcatgatttttcaggatcccagtacctcgctgaatccccgtcagcggatcggccagttgctggatgcaccgctgaaactgaataccgatctggacgccaacgcccgtgaacagcgtatttatcaaacgttgcggcaggtcggtttgttgccagatcacgctaactattacccgcatatgttggcctccgggcagaaacagcgtatcgctctggctcgtgccctgattttacagccgaaagtgatagtggcggacgaagccttggcgtcgctggatatgtccatgcgctcacaaattatcaacctgatgctggaattgcaggacaaacatggcatagcgtatatctacgtgacgcagcatttgggcatgatgaagcacatcagcgatcaggtgattgtgatgcatgaaggcgaaatcgttgaacgtggcagcaccgccgaagtgctagccgccccgctacacgatttgaccaagcgcctgattgccagccactttggcgaggcgctcaccgccgatgcctggcgacgtgacggcgggcgcttttaggcgtccccactgctcggagcagtggaaaagcaccatattcagtccgggcgtgatagaatcgctcggtttattaacgcaaaacgcgctggttaagtcgatgtttcaacaaattgttttaatattcgtcaccactcgcgtcagcacgcaacaatgaccacaaggattactgctatgggttttctaaccggcaaacgcattctgattactggcgtcgccagcaaactgtctattgcctacggtattgcacaagcaatgcaccgcgaaggcgctgaactggctttcacctatcagaacgagaaacttaaatcccgcgttgaaggctttgcggcagagctgggttctaccctgatcctgccttgtgatgtagctgaagatgccagcatcgacgccatgtttgctgaactgggaaaagcctggcctaagtttgatggtttcgttcactctatcggttttgctccggcagaccagttagatggcgactatgttaacgccgtgacccgtgaaggtttcggtattgctcatgacatcagctcttacagcttcgtggcgatggccaaggcttgccgttctatgctgaacccgaattccgcgctgttgaccctgtcttatctgggcgctgagcgtgcgatccctaactacaacgttatgggtctggcgaaagcctctctggaagcgaacgtgcgctacatggctaacgctatgggtcctgaaggcgttcgcgttaacggtatctctgctggcccaatccgtactctggcggcatctggtatcaaagatttccgtaaaatgctggctcactgcgaagccgtaacccccatccgtcgcaccgtaaccaccgaagacgtgggtaactccgccgctttcctgtgttccgatctggcggctggcgtttccggtgaaatcctgcacgttgacggcggtttcagcatcgctgcgatgaacgaactggaattgaaataacccgcagcggatttattcgctcaaggttatccgaatccgctgcctcatcgcagcggattttttttggcttcgatgagttctttgctcagattaattccatcaattaatcgttttttggcaaagttatggccatttttgttatatcaatccatatgttattacttttggttatggaatatggtttaacattattttatctcactaatccgatcggcaatgatatccactgcgtttacctcatcgaaccacaggatatcttaccgatgtcgatgccaactccggtcttctgctatttatccggcaacggcttagctggcaacgttcatttgttgttcttctgtgtttgctcaattgattcggctacagcccctgctgttgctgccgtttttatcagtaaaacaaggagatcttcatggtgcagtttcgacgtcaggataatgcccactggtatcacgagactcaacgtagcgtaacagacgacgcattacgggagggcgtttgtaccagcggccattacggacacgatgatttctcggccttaagcaatagtgagaatctggctaatgctttttctgataaaagccctttcttattgggattagaagcgcaggtcaatccggacttacaggatttgttacagcagcgcgacgaaacgctacgagcctcgcaccgcatgtatcaaacgctgttcccaccccaggtttccctctctaccgagctgactctgtctctctacgatcgtttaagcagcgccttaatcgtggctcaggtcaccggtgttcaacgtttgtgtaatcactatgccgaacgtctgatgccgttatccagcgatgacgcatcgcgagaaagcaatattcgcctcacgctactcacccagtacgcccggcagttagccagtcagccgacgctgataaaccgccgcgcattgcagcagctcagcgattctgggctaacatcactggatattattctcttctcgcaaattattggcttcgtcggctatcaggcgcgagccgtcgcggcagtttctgcgttagcgggttatcccacggtgctgttgcccggttttcctcgaatggaagatgcggaaagcgcgaattttagtgatgaagtgacgggctggcaggcctggctgccggatctgtctttagaaacggaatcgcaggaacaggaacaaaacctgaccttaaccgatgtgttaaaccagcatcctcatagccagcaggtttacgctgatattcttttgcgcatacgggttcccgaccatcacccgcagccggcgttactggaattggcggctctggtcagtgcgcgaatcaacggcagcgcctgttgcctggttcaccatcgtcagcgctacttgcaattaaaaccagacattactctcatcaataaattacagtcaggcattagccagaatttgagccaaagttcgacggaatcagtggaaagctcggtgattcatctagcggcggaactcacccgcgcgccggaaaggtttggtccgccgatactggctccgttgcaagagcgcggtttttcaccgctgcaactgatggacaccttattcagcgtagcgctagcaggctggaccaatcgattagtacaaacattggggtcgcctcgcggcgcattgcagcaggcctggaccgattaaaccggtgccaaccactctctggcggcgtcaaagaaatgctgagccaacggcgtcacgcgccccggctcggcaaccaccacggccgcacggcgactcatactgacaatattcaccggccgtcgcatcagcgccggtgacatatcctccaacaagcttccacgtggaaacaatccgcagcctaaaccgacgaagatcccctgtaataactgaaatattgaggtagtttccaagcgcgcatgcagagagaaacccgcgtcgcgaaagctgttatccagataacgacggaaataacgcgtcggctccgctagacacagtggtaattccgcgacctgagccagtgacaatggagtttcatccaccaaatcagggaagtgctgagggtgaaaaatcaaatctacaccgctgtcttccaaaggctgagactgaaaatgcagctcattcagcgtggaaagctcgaaaaaacctattcccacatccactgagtgaccggttaacgcctccaatagctgatcggcactcagtaccgaaacccgataatccaactgcggatagcgctcgctgacccttttaagcaaatctgacagggaaatgctgcactgcggcaccacgccaatccgcagagtcccgttcaaaccgtgtttgagagactcaacttccagcttcaacccttgataaaccgaaacaatctcccgcgcccaggccagcacgcgttccccttctggagtaaaaccttcgaaattattgccccgattgatcagcgaaacacccagttctcgttccagatttttcaggcgcatcgacaaagtcggctgactgacaaaactggcctcggctgcccgcccaaaatgacgagcctgttccagattgcacaaatagatcagttgtttgatatccattactgcgctcaatatcgcgttatttattccagtatatcattttgctcccctatctcagcggcctgaggcggttttgcagcaaagcctgtctgaactgcgctatccgcgctcagcgactctttctacacttgctcaatccaatcaagcagctctcacccaacattaaaaaccatttggcagacaaataagactttctgcaatttttagccgatttgtgaagttcatggcgattaacccggtcaaaaagatgggtttcaggctgagagtcaggaacagagagtttgcaagacaaaattttacttaaatttgataactggatcacatttcgttatcaggttaaccgcattctgttgcataacaattcactcaattttggataattatggaaaatcctgtatatgcacaacatttagcgggtcatttaaccatgtacaatgtgatgagctattgatgagccaaatagcagaatatatcactaaataaaatccgctcagcttttaatcaaaataaaaaatcggtaaaccgcgaaaacataaacgttaatactgcataacatttgtaacatgggtttattcccctgcctcgcttatatgtaacagagtattacaaagcgcttgtctcattgacaaagatagtgaacattaaccgccgccattcatcttataacaacgcaaaaggatgccgttccgcgcatcacatttgcaaattcctgtcattttatggccggtagtaaaaattagaggtccctgtgacaactgcaaacaacaacagcaacgaacctgaaagcatcagtatgaatgctttcaaacagccgaaagctttttacctaatattctccatcgaactttgggaacgtttcggttactacggcctacaagggatcatggccgtctatctggtgaaaatgctcgggatgagcgaagccgattctatcaccctgttctcatcattcagcgcactggtctatggcttcgtcgccatcggcggttggctgggtgataaagtgctcggcgcaaaacgcgttatcgtgttaggcgcgctgacgctggccgtgggttacaccatggtggcctattctggacacgatattacttgggtgtatatcggcatggcgaccatcgccgtaggtaatggtttgtttaaagccaacccgtcctccctgctttcaacctgctataacaaagacgacccgcgtttggacggtgcattcaccatgtactatatgtccgtcaacatcggttcgttcttctccatgttggccactccgtggttagcagcaaaatacggttggagcgtggcattctctctgagcgtggtcggtatgttgatcaccttggtgaacttctggttctgccgtaagtgggtgaaaaaccaaggttctaaaccagatttcgcgccactgcatttcagaaaactgcttatggtgctgattggtgtggttgcgctagtgacgctgtctacctggttgctgcacaaccaaatcgtggctcgctgggcgctggcgctggtttccctaggtatcattattatcttcgccaaagaaaccttctctctgcacggtactgctcgtcgtaagatgatcgttgctttcctgctgatgctggaagccgtggtgttcttcgtgctgtacagccagatgccaacttccctgaacttcttcgcgattcataacgttgagcattccatttttggcctggcgtttgaacctgaacagtatcaggctctgaacccgttctggattatggttgccagcccgattttggcggcgatctataacaaaatgggcgacaagttaccgatgccgcacaaattcgcctttggtatgatgctgtgctccgcagccttcctggttctgccttggggcgccagttttgccaacgaacacggcattgtgtcagttaactggttgattctgagctacgccctgcaaagtatcggtgagctgatgatttcaggtctgggcctggcgatggttgcacaattggttccgcaacgtctgatgggcttcatcatgggttcatggttcctgaccaccgccgctgccgcactgatcgccggtaaagttgccgcgctgacagcggtgccaagcgatgtgcctgatgcccatgcttccctggctatctacagccatgtatttatgcaaatcggtatcgtcaccgccattatcgctattctgatgatgctgaccgcgccaaaactgtatcgcatgacattagatctgcaaaagaaagataaagacgcgactccggtcactgctgcataagcaacccattagtttcgttagtcaaaacgcctcgttatgaggcgttttttgttttgatgcaaaccctgtggatcacacatcaaagtcgatactcgcaaggtgacaatcagctaacggcgaacactgcagatacaggatgggcagtaccgctagcatttaatttcgtattaacttccgcgattgtgcaacgtaatcctcatattcaaccctaccggcgaaatctctacgataacaggacgaaacgatccagccgccgacgtaattgcgcgttttctttcttgagttgctcaacttgcttcagtagcgtcaaggtcatcgccacgccgtgccaatccagatccaactcattttgcaatcgacgggcgcgctggagatacattaacgcttccgcgtcaaatacccagagagaatcaccgggatctagcggaacaatcactcccagctcaaccacttctaccaattcgtcctgcaaaatgcccgttgtctggcataattcagtcagcgtataagtaatctgtacttcggccataatctgttactcccatccagtccgaggattaaatgcagcctgttcagacagttgttgccacagtgcccgtgccttctcgtccggttttggcggcataaccaccttgagaaccgcatacaaatcgccagtgccttttttgctcgccaaccccttacctttcactcgtaaccgctgaccgctctgactgccggagggaatagtcagattgattttccctgtaagagtgggaacttcaacgctggctcccagcgccgcttcccaaggtgcgagcggcaacacgatttgtaaattctgcccgtcaatatcaaacaatggatgcggagcgatacgaatgaccagatagaggtcaccattggcgccgccaccgaatcccggaacgccttgccctttcaaacgaatacgctcgccatccccaacgccggcaggaattttcaccttcagcgttttggttgagtcggttctgccaagggcatcataagttgggatttgaattgcgcgcgtctgctcggaaagcgtttcttccaagaagattggcaactccatctcaatgtcctgcccgcgcatactctgagaagattgatgggaggaataatgagcagaggcgccgcgattgccgaagaaagagtcgaagaagtcggaaaaatcatgggtatcaccgccacctgcacgaccctgccactgttgcccgccgccatgataacctgcctgctggccaaaatgaggatcgttgcgatgtaacctcagttcgtcatattcagctcgccgttcagcgtcttttaacacttcgtaagcctcggcgatttccttaaactgactttccgcatctggctcggtgctgacatctgggtgatatttccgcgctaacctgcgataagccgttttgatctctttctgcgaggccgttggctcaacgcccataatcacatagtaatctttgaattccatacggcaatatccttaagtttaatgtgccatagatataagatatccccatctaacttttataaaacaaatttatgcatatttctatccgtactcccacgcgccaatccacctgtaaactatagcgctgacctgggtttacggactcccctcaagacatttggcgggaacagcccttgttcatccgtatcaagcgctcaacagatgcctgttaatgcataaaaagaacgtcactgacatggaaaaccaccgagtaaggtgacaatctgccaggtcaattgccctttcaaccttatgttattaaatgaattacgtggtaaagtgagcgccaaaataagcgatgcaatcacaatttaagcaacggataagtcatgaatttaagaaaccggacatttcttttttggggagtgatggatctctacgcggtgttatatatcggtttacagtatttcctacaggaaagaattcctttggtagctgaagtgcagtacctgctggataccggttttgataagtatccgctgatttacacaatgattaccctatcgatcatttttaaaatatcgctggtaatgaccacagttctgtttctgactcgcagccaatatgccattaaagcggcatttattcaggagcctttacgcctactgttagttattccctctctctcgatgattacgccggttctgaaagaattcaacattaaaattcttaccgtgagcctaacgctattgctgatatctgaagtattcaaaatcgtttctttatatagagtgcaaataaagaccgagcccaataaaaccactcccttcatcgtctgattcgggggaaaacagcattttcgcgctattggcaaaacgagtcgctcagtgggagccaggccaatgccctgttatgccgcagtctgagtcatttcaccacgagtaccgccgccaggttatctcgctatttcgctaatcacttagaatcaacccaacccattgattacatgcccgtttggcgggcatgcggatgaccgtaattgactgactcatagaagatagctttacttactccgccgaccataccgctaactggtagccatccggatcgagaaattgaaagcgacgaccaccggggaaggaaaatatcggtttaaccatcacgccgccagcttcaacgactcgccgttcggtttcttccagattatcagcatacaaaatgaccaacggcccaccggctgctgtcacgaccccatctgtggtgaaaccgccagtcaggcgaccatcggtgaattcgcaataggttgggccataatcggtaaagcgccagccaaacaggttaccgtagaaattttttgagcgagtgatatctcccactataaattcaatattatcaatttgacccttcttgcctgatacagccataacacctccggagaaaaatgcacaccgcgtattttgcaaatagacgcccgctgagccagcctgtttggctggaaaaccataccattaatcctatacgtgaaatccgtaatattctcagaactgtcgcccatatcgcttatcgccgccagaacccaaagcgtgataaggaataagtaaaattcaccctatcgcaccgaagcagaaataatcctgtataagaaataaactatactgtgatcacggctgcaaaatatgtcggtagtttcagacataacataattttcagccttggcagaagaagtatggcatagaggttaaatcagcccgtgagagagagtcggtaacgggcaaggaggtatctcatggtcaatcatgtttggggacttctggtgcatcccagtcaggaaatgaaacaaatcaaaagtgaatcggaaagtattccccacttttatactcaccacgtcctgttgatggctgcaattcccgtgatctgcgcatttattggcaccaccagagtgggatggaattttggtgagggtcaggtgattaaagtctcctcgcttaccgctttctacgccgccgtaattttctatgtgatgattcttgccgccgtggctttaatggggcgagtgatttactggatggcacgccgctatgaaagtcgcccaagctggcaaagctgcaccttgttcgccggttatgccgccacaccgatgtttctgagtgggattgtggcggtttaccctttgctctggctgtgcttgttcgccgggattgtcgggctgtgttacgccggttatttgatgtacctcggcattccaaccttcctgaatatcgaccgtagcgaaggttttatcttctccagttcaacgctggccatcggtgtgctggttctggagctattactcggtttcaccgttctgttatggggttatggcgtcaggctaatctgagcaattcttataccaacaccctgcaccgtagatctcctacggcgtagggtgtatctctatttcatcttccatgttactgataatagagagattaaccttatgaatagacagcgaacattcgttattgcacttatttccccccttctctgcaattccttccctgctatgagcgctattcctatacaggatgggattactgagcaaactctgattttcgttcgtcatgcagagaaacctgaggcaggttttgggcagataaattgtcagggtttaaatcgttccctggcattacctaaagtgataaaaaataagtatggcaaacctgactttatattcgccccagatccaacgcgaaaaaaagcggatttcggccacttcttttattatctccgcccgttggcgaccattgaaccgacggctatctacttcaatatgccgataaatatccgtgtgggtcagtcagaaagtggctggcttatcaaccaattagaaaaaccaaaatattcaagcgctaaagtgcttatttcctgggcgcatcatgaaatcatggctatcactaaggcactaatgaccgaatataacggcgagcttggacaaatacccgaatgggaaaatactgattttgacagtatttacgttcttaaaatcgtgcgaagtgagggggcaaaccagattagttttacccatgaccaacaggggctgaatggattaccgcttgactgccctgaaatttccctgccgcgatctaattcattaccgggccgagttcccgacaatagctgataataataactcttttttatctcgattttttaacactggatagcaaattctctgtttttgggtcattaacagcctttgaatcatattaatgtcggtgagatcgcaatctcttacatcaccccgacaaataaggttgtacactaattgggaaaaataaaaataaggcgacgaaaatgaaaaagctgactgtaaaagaaatgaccgcaagcgaacaacgcgacgtgaaaacccaacttgatagagccaggatcaacatgggacgcgcactcaccaattcagaacaaaacaaagtgaaagacgaagccatcgaaaaaatcatgcaagcccgagcactggtcgccaaagccaaccgccctgagaaaaaaaccaaaaaaacggcaccgagcaccaccacctttagctggtcctcttccatcagcagccgtccaccacgttgagtctttcccccgtcaggtttttgcctgactgggcacccaatttctagtagcggaggtcatcctccgtcactatcggattgttatgattcctgccgttaaatatgttaattcaatagctgattttccctcacgactgtcctagtatggctaatgctgtattccgttagtccgccccgtgcactattaaggagtttgttgatgaaactgttttataaacctggcgcttgttccctctcaccacatatcgtcctgcgtgagaccgggctagatttcagcgttgaacgcgttgatttggcaaccaaaaaaactgaaagcggcaaagacttcttaaccatcaaccccaaaggacaggttcctgcactggtgttggatgatggcagcctgttaaccgaaggcgtcgccattgtgcagtatctggccgatcaggtgccatcgcgcaatctgatcgcccccgcaggcacccttgcccgctatcatgctattgaatggctaaactatattgccaccgaattgcacaaaggattcagcccactcttcaacccgaaaacgccggacgagtacaaaaccatcgcccgcgagcgtttagacaaacaatttgcttatgtcgatagcgtgctggcgaagcatcatttcctgctgggtgataaattcagcgtagcggatgcctatctgttcactattctgggttgggcaaaagccatgcagttcgatctgccgcagtataaaaatctgacggcctatatcgcccggattgcggcacgcccagcggtagacggcgctctggttgcggaaggtctgaagtaagaaacgtaaagaaagaatgatatcccccggcaatggcagacttgcgcttttgaccgggggaaaatgattagagttttactgccgtaaactgatgaaccggattgacgataagatcctgtgcagccacgatttgtaattcatactcgcccatttgctgggtagtcagcatcacttcataaactgcggcggtgacgtgctccagcgctttatctaacgcttcgccttttagcaaattcaccaacagtaggccgctggttaaatcaccgacgcccaccggctgacggctgccgaaatccaccaacggacggctgatatgccaggcatcttccgctgttaccagtagcatttcaaagctgttcaggtcataacccgcgcggctaagatgcttaaccagcaccactttcggccctttagcgcacaggccgcgagctaccgtcacggcttgctcgacgttttccactcgcgttccgctcagctcttctaactcaagcaagttcggcgcgataatatcgctggccggtaatgcctgcttacagaagaattccgccacgcccggcgcgacgatgcagcctttttccggatggcccatgaccggatcgcagaaataccacgcctgcggattggcttccttcacgcgtttcaccgcagccaaaatatggccgccctgctccggcgagccaatatagccgctcagcaccgcatcacagtctttcaaacggtcaacatcggcaatgccctgcacaatttcagtcaaatggctggctggcatcacgcagccagtccaatgaccatactgagtgtgattggagaattgaacggtgttcaacggccagacattaacgcccatgcggcgcataggaaattccgcagcgctattgcctgcatgaccaaaaacaacgtgggattgaatggaaagtatatttttcatcggtacggcctaaagttaggggctgctcggccctttcagtaacaccattatcactgcgtgtttgcccgcagttaatcgttgaccataaaaaacaagggacaccaggccccttgttttcgcaccgatttagatccagctcaccaggcagtaatgttttttgccccggcgcagtaaggtaaagcggccaaacagacgatccgcatcgctaaaggtgtattccgggttcgcctgtttctcgccgttaatggtcacggcattggaaccaatcagggtacgcgcctgaccgcgggacggagccaattccgcattcaccagtgcctgttgcagatcggcatcgcgggttaactcaatcgccggcataccgtcttgggccagttgggcaaagtcggcttcggtcatgtcgttcagattgccggagaataggctggccgtaatacgttttgccgccgccagaccttcagcaccgtgaaccataccggtcacttcttcagccagcacgtactgagcgcgcggcgctttgccgctgtttttatcttcttcttccagcgcattgatctcttccagactcataaaggtgaagaatttcaggaagcgatacacatccgcatcggcggtgttaatccagaactggtagaacttgtacgggctggtttttttcgggtctaaccataccgcgccaccttcggttttaccgaatttggtgccgtcagctttggtaatcaatggcacagtcaggccgtacacttgctgctgatgcagacgacgagttaaatctatcccggaggtaatattgccccactgatcggaaccgccgatttgcagaaccacattatgctctttattcaggcaggcgaaatcatagccttgcaacagattgtaagagaattcagtgaaggaaataccgctatcatcgcgatttagacgttgttttaccgcttctttgttaatcatttggttaacagagaagtgtttaccgatatcacgcaggaaagtcagcacattcatgccgccgaaccaatcgtaattgttggcggtaatcgcgctgttctcgccgcagttgaaatccaggaacggggaaacctgatgacggattttctcgacccattcattaacggtatccgcggtgttcagcttacgttccgtggctttgaagctaggatcgccgatcaagccggtcgccccacccaccagcgccaccgggcggtgaccctgtaactgaaaacgcttcaggcacaacaacggaaccaaatgacccaaatgcaagctgtctgcggtaggatcgaaaccgcaatacagtgaaattggcccttgcgccagtctctctgctaacgcgtcttcatccgtaacctgggcaacgaggccccgctcttgcaattgtttaatcaggttgctgctagtcattaacgactccattgtcttatgcaatatatttatctggttaacgtttaacgggaacacttgccatcgggaaatgttgtcgtttatcggcgtaatgcctgcgtgccagatggcaccccatcaggatgcgttcaaggaagggtatagaataaagcgcccgccccgcgagcgctaggtttaacctcaatatttcatcgttctcagggggctaaacggtcaattttccacgtatcggcgtctcgttggtagagaaaacggtcatgcaggcgatgttcgcctccctgccagaactcaaccgagtcgaaacgaacgcggaatccgccccagaaactcggcaccggtacctctccctgctggaatttttgtttcaactccaaaaatttgctttccagcacgccgcgcgcggaaatccgcgaggattgctgagaaacccaggcacctatctggctatctttaggacggctgttgaaatatttaagtacttcgaaggtcgacaaacgttcggctttgccgaggaaaatcacctggcgatccagcgtatgccaagggaatagcaggcttatatgggggttttcagccaattgctgagcctttcggctgcctaggttggtgtaaaacaccatgccttcgtcatcgaaatgctttagtaatacaatacgttgaaaaggttgaccattggcatcaacggtcgccacgcacatcgccgtcgggtctgcgagacgcgcttcacaggcttgtttcagccagcgctcaaataaatccagcgggttagcagtcaggtccttgcggcgcagaccgccacgggtatattcacgtcgtaggtctgcaacatcaaactcattattttcagtcatatacactctgtaacgcgctgaaactcagtggattattattgtgcctctgtgacgccaagatctcaatcgccctgacgtcactgcctgtttctagtagtcaatcacttcgagggcacgagcacgcaatcattcatcacgattttatcgccccgctcgataaaggcgctgtcacctttcgaccagaacgtataataaccgtcactgtatcgggtgcccgaagcagcaactacctgcggcagattcagttgcttgccatccatcacaaacctaactttgtcctgcttattatccagcgctaccgtcaactgggtacccccgcattgatagtgcaaagtttcacttttctgtgaaaactggctacatccagccaaagtcagtacggcaatcgccgtgaaaacggatttcattgccttatctcctgtcatgagcttctcccgcagcctatcacccgtaggctggacttaccgaatatattgaattgcagaataaattgaatcacctaatatcctaaaagcgtcgccttatcgccctggctgtatgaccgggtaaatcgcgcccaaaacggtttcacagctggctccggtaaccgacggtaaattgcccggcaggcctgaaagcgtgcgaaatgctagccaggcaaaagccagggcttccatatcgtcgccactgacgccaaagctgtcggtggtcgcgacttcagtgcccggcaacatcgtcgacattcgcgccatcaatagtggattccgcgcaccgccgccgcacaccagcaaacgctcgcaacctcccgccagttgaacctgttcggcaatggtcaccgccgtcagctctgccagcgtcgcctgcacgtcttcaggcgctattcgcggcataatcttcagctgctgttccagccaggcggcgttgaaatactcccgcccagtgcttttcggcgcaggtttggcaaagtaaggatcggacaacatttgcttcaatagcggctgattgaccttaccgctcaacgcccattcggcatcgcggtcgtaaggcaacgagcgatgacgccaaatccacgcgtccatcaacatatttccggggccggtatcaaaacctctgaccggagaatcagggatcagcatggataaattagcgataccgccaatattcagcaccatccgccgttcggcattatgcgccagcaatgcgtggtggaaagctggcaccagtggcgccccttggccgccataggccatatcccgtcgccgaaaatccccgacggtagtaatctgcgttatcgccgcaatgcgattattgtcccctaactgcagagtaaaacctggctctcccatcggttcatgccagacagtttgcccgtgacaaccaattgcggtgatgtcctgcggcgacacgccggtttttttcatcagcgccagcaccgcttcggcaaacagcgtgcccaactgcgcatctagcctgcccaccgccgataaggtggtttcttgcccctgacacatcgccagaatatcttttttcaactgaagcggtatcgggtggctataagtggcctgctgcgccaccattcgctcattgatcgcagccagaaccacatcgattccatccaggctggtacccgacatcaccccaataaagcggcctgatttcatagcaatgaccttatctcccgctgcgggagtacaatgacaaaaaaaaaacaacaacccccaatgaggttactaaaccagaataataaaattaacaccatgaaaagatgtagtttttagagtgtatcccgcgctgtcttcccctatataatgcaaggctggttttgccaggcagctcacagaaaatggatgatttttttctttttcatttcctgcttttagaaatttaaaccaccgtttaatattgattaagggaatacacgttaggctagcgatcaactaaccgacaatgtgcttcaatacagtgtggtgcgataactacaatgtgatgcaataactgttggggtcagccatacttttatctatacccgaaattaattggtttcgcgtataggtagacaggacatagtgaaccgaatatcggttatgcactttaaactaggagtttttatgattaagcctttcctcgtcattgctatcgctgcggttactctgaccggttgtgcgaacaacagcacgctgtctggtgatgtattcagcgcgtcacaggccaagcaagtgcaaaccgtaacctacggtacattggtttctgttcgcccggtaaccattcaaggcggtgacggcgacaacgtaattggcgctatcggtggtgctgtgctgggtggtttcctgggtaacaccgttggcggtggtaccggtcgtagtctggcaaccgcagcgggtgccgtagccggtggcgttgctggtcagggcgtacagggcgcgatgaaccgtaccgatggcgtgcaactggaagtacgtaaagacgacggcaccactattctggtggttcagaaacaaggcccgactcgcttcagcgttggccagcgtgtgatgctggcaagcagcggcagcaccgtgaccgtcagcccacgttaagtttggcgcggacataaaaaaaccggggatcacattgatccccggttgttttcttttgctgtgaatagattatttgaactttattatttttacttactgtgtaattgattaatattttgttcaagtttcattagcacacctgttaacaaaataacctccgcatccgtgatattcgacatgacttcgcctcgggttgtttcaatgacgtgttcgagttttttgatggtcgaacacgactcttccgttaatttaatccgcttagcgcggcggtcgttagcacaagtctgccgtgtgattaatcccttatcctccagttggtccaaagtccgaaccaacgatggctgctcgataccaatcgcttttgccagttgaatctgcgattgctccggtggtaaacgactaatgttatggagcgtaacccagtgtgtttgggtcagttccaacggttttaatcgatgatcgattaaagcgcgccaaacgcgaactaatcgtgctaaatcagatcctaatgtcgattccaattgcccctccttttaattagcgtgctagcataactcccagagtccagtctattttgggtaattaacattaaaaatacaaatgtatatataccgccgatgcagtgttaatagcaataaatacgagaaatcctttagaaaaggtgaagatttctttaattctaaccccaaaggattaacccaatgcaagtaactcctgtaccaatggcatcacccttaacggactgggtactgggtgcctcgatctatttcccgcctctcttcaaggcggttatgctaggtttgatattttggctattgatccatcatttactacggaattggatctactctggcgagatctggcatccaatgttaatggatttgtctatttttgtcattgccgtcagcatttctttgtggattttagtcagttggtaaattgagatgaaatatcaatcgataaaatatttttccagcgtgatcgtttttgctatcgctatgttcgccggtgggtggatgtggaattattatatgcaatccccttggacgcgagacggaaaagtccgcgcagaattagtcaacatcactccagaagtgtccggcaggcttattcaaattgcgatacacgacaaccaattagtaaaatccggtagtctgttattcgagctagacccgatgccgttccaactggcgttggataacgcgcaggccgcattggataaagcgcagtccgatatggataaggccaatcatgaattggctcgacgtcaaaatttacctaaaaacctcatatcaggcgaagacctggatattgccaatttaaccgctcaagcaatgaaagcggcatatcagggcgcgctggctaatctggaacaggctaaatggaacctgagtaaaacccatattcatgcaccgactgagggatatataaccaatttacaaacgcgcatcggaaattatgctaccgcggggactccattagtggctttggttgatattcattccttttacgtaatgggttatttcgaagaaaccaaattacgacatatcaaagaaggcaaccgggcaaatattgttttatataatggaaatataccccttcagggtgtagtagaaagtatcgggcgcgccatttacgatcaaagtgtcgatacaaatagcgacttgctcgtcgatgttaagccgaatgtcccctgggttcgtctggcacagcgcgtgccggtacgtatcaaactgatcgatgttccgccggacgtaaccttagtggccggcaccacctgcaccatttctctggctgactgacaaaaatgcactggctaccgctgcagtggaaacgcacgccctgggggaaggccagcggggcgcagtggcgctatgccttgcgtaattcgctggcgatgtgcttgtcactgtgggttgcttttactctcaatctggatgagccttattgggcgatgacttccgcggcggttgtgagtttccccaccgtcggcggtgtaatcagcaaaagtattggtcgggtgattggtagtctgatgggtgccgctgcctcggttattattgcaggtcactgcctgaatgatccttggctgtttaccttcgctattgccgcctggatcggctggtgtactttcgtatccaaccattatcaaaataacgtttcctacgcctttgctctggccggttataccgcagcaatcatcgctttttcaacggtcaacactacggatactcaacaaattttcgatatcgctcaggcgcgagtctgcgaagtgattaccggtattttgtgcggtggcctgatgatgatgctgttgcccagcacctcagacggcgaagcgctgctgacctcgctgcggcgtatgcattcccgcctgctggaacacgccatgctgctgtggcagaccgaagacgatccgcagattcgtacctcacacgagggcgtgatcgggcagattctgacgctcaatctgttgcgcattcaggctttctggagccactaccgcttccggcgacaaaacaatacgctcaattttatgctgcataatcaattacgaaccaccagcgtcatcgccagtctgcgacgtatgttgctcaactggcccaatccgcctggcaatctgaaaaaggttttgcaaacgctgattaccgagcttcagcagccagattgcgataaatatcgagccgccaaaattttgcaacaaattatcccgcgagataaagatgattaccgccaccgcgcattctggctgcgtttacgtcatttctgttggttgtatctggaatctggccattggttacgccaattggaacaacacagtgaacgaactacattgcccctccccaaggttgccacgctggcgcgccacaccgatacctacgaagcggcttacaacgggttacgcacctttgtctgtatcgttattggctgcgcattctggataaacacccaatggagtgcaggcagttcggcgctggctttggccgccgtcagttgcgtactgtattccgccagcccgtccccgacggacagcatcataacgttgctgaaagccatcgtgttgttatccatcggctgctttattttaaaattcggcgtcatgattcgaatcgacgacttttggttgtttgctgccgtactcttaccgatcctggttaccatgcagatgtttaagcagcaaaatccgccctacgcggcgctgtgggggcagcttatcgtttttatgggttctttcctcagtgtgaccaatccgcccagctacgactatcagggcttccttaatgacaacctcggcaagttggtgggcgtgatgctggcgggcgtggctttccagattttgcgccccagttcggataaacgaaaaggccaacgaattattcgcgccctgcggcgagactttatcgaccagctcagcccttatccgcaacaaagtcagccacgatttgaatcgctgatttatcatcgcatcagccagttaaatctcagtcaggatcaggaagcgcgcatctggctgttacgatggggcatggtctatctgaattgcagtcatgtggtatggcagttacgggactggcaaaccactgcgccgccgctgtctgcggtgcgggatttgtgtattcattgtctgaaaggcagcgtaacggaaaaaggcgttgagcctgaagcgttagcggcaacgctgcaagagctactgcgcatcagcgaaactctggctcatcatccggactcgtcggggcgagaactggcggggctggtttggcgtctgtactgctcgctgacgcaactgcagctcgccctcaccccgccggctatttcttcccctgcctaaggattagtcaggggagatcaatcatcaaggaacgtcataacccaaagcggcgcggcgaatgcggaaccactgctgacggctgagcgttagggatatcgatttccacgcggcggcaacgcgctcaatcttgcctgaaccaataatcggcagcggcacagagggcaaacgcatcacccaggcatagaccacttgctcgatattctccgcaccgatttcttccgccacggcctgtaattcatcacgtaatggctggaactccccatcgttaaacaaacgcccaccgcctaaacatgaccaagccatcggtttaatacgcaattgctgacacatatccagcgtgccgtccagaatggtaggctgatgcaacggcgatatttccacctgattggtcactagcgagaaaggcaggcgagattgcagcagactgaactgagccggtgtgaagttagatacgccaaaatgcttcactttgccgcttttgtgcaactgagtgaaagcctcggcaacgtcgtcagcctccatcagtggatcagggcggtgaatcaacagcagatccaaataatccgtgtgtaaatgagtcaatgattgctcggcgctgcggataatatgatcgccatcggtattgtagtgacccaaggcgtgctctggcttagccgtcgtcgcgatgccgcatttgctgacgatttccatcttatctcgtagtgatggttgtaaacgcatcgcttgtccaaaagcctgctcgcactggtagccaccgtagatatccgcgtgatccaccgtggtaatccccatatccagatgctgctgaataaaaccctgtagctgggcgggcgtcatgttccattcgatcaaacgccagtaaccgcaaatcatgcgggaaaattcagggccttgcggcgataattggctacgtgtatgcattttgaccacctatatatgttgaatgaccttcagcatacacaagcgacagaaaggatcatcatcctgacgcaaggaaatggcggttgatcggtatcaaaagatgaatttaaaataatgacggttgttccggtagcggttcttccggttttttgttggcacgtagctgacgcaacaaacgttgacgacacaggcgcagaacgtcgtgtttttgcatgtcggtcatttgcatccagccaaagcgctcttcccggctgcggaaacagccacggcaaaaaccacggtcatctgcttgacagataccgcgacaaggactgggaatatcaaaaaactcaagctgctgagccacacaacctcctcggattaccctttcattgaagacggcttaacggcggctggcaagtacagattcgcgatgtcgctgaaaataatcccgcagataacgtatcacctgacgatttttttccggcatcgccctttccagcgtcaacgcatgtaaccgcagcggcgttgattgccactccggtagcagcgtgattaattctccgcgttgcagctcatcaccaatttcatacaaaggcagcacggaaagccccatcccttcgcgagtaaaatcgcggataaccggcatactaccgctaataacctgcccgtgattcagacgcaaaaccatcgtttctcccgatgtgtgatgcaaatctaaatgaatagccgagggattattcaccgaggacatccagcggtgcgccagtaagtcctgcggcgtttctggcacaccgtgctgactgagatagcgcggtgcagcgcaaatcaccatcggccactccgccaacggatgggcaatcatattggcgtccgccagctgtcgattgactcgcagagcgatatcaacccgctgttcgatcaaatccaccacttcgtcattggccagaatccgcagggttaatttgggatgagcgtttagcaaaggggacaacgcttccgccagcgggcgaccaccgatacctacggtagtggcaatgcgaatttcgcccaccagcgtatctcgtagctccgccaaccgctgctcggcctctttcgcctgctgcaacatggcttcgcagccgggataaaaaacctgcccggcttccgttaacgtcagcctgcgggttgagcgatgcaacaaggggacgccgagcgctttctctaaagagcgcatatgctgactaatagcggatgcggtcatacccaaccgtcgccccgctgcggttagcgaaccttcggccactacggtggcaaaaatcgccattcggttgagtttatccatgattatgaagttttacttaaagaagaaagcacaaatatggcacttatcagccagtttgttaagtattagagttagccccgtcaacccaacttgaggaattaaacgatgaaactggcaattattggtgcaactggttttgtaggccgtaaagtcatcgacgaagctctggctcgcggtcatcaggttacggcgattgcccgtcagcctaaagatttacctaaaactgataacctgaccatcgcattaggtgacattgctgatactgactggttagcccaacaattgagcggtcaggatgcggttatcagcgcttataaccctggttggaccgaagaaaatcagtttgaaaaattcacggcgggaagccagaaaattctggatgcgcagcaaaaagccggcgtgaaacgcctgttggtggtcggcggcgcgggcagtctggaagtcgcccctggcgtggagttagtcgatacgccagacttcccggatgcctacaagcaaggcgccttgggcgcccgtgcgttacgtaacaagttacgcgctgaaaacacgctggattggacctacctgtcaccggcggccttgctggaaccaggaaaacgcaccggccagttccgtttgggtaccacttcgttgctgatgaacggcacggcgccagccagcatctccgtggaagatttagcggtggctattttagacgaaatcgaaaatccgcagtttattaaagcgcagtttaccgccgcatactaaggacgaacccgttctgcatcagcctcgcgcatggcagtcaaacctaccctcataggtgtgccgtgcgcggggcttttcttctttccgcttgtgtcacgtctttccgcttttgtcacgttttgtttccaaacgctaaggttatcttaagtttgctactgtatcgtgccaatcattaatgaataattggttctgattagcaatgaatggacgattcaagttacagtgtaacgcaatcacctttatcttaagctgcgcgctatttttcacgctgtttctcaatgctctttttatacacaaagcctggtcgctgatcgccttcggcagcctagatagttatgtgttcgccgccacgattccgctggtgatattctgcgcgttgaatattactttcagcctgctgtgcgtgccatatctgcggaagccaatcattatcacactgctgctgggcagcgcggctgctaactattttatgtttagctatggcgtggtgatcgacggcaatatgatgcaaaacgcctttgaaaccaatgcgcaagaggcaaccgccctgctcacgccacgcatgggctggtggttgctggggctgggcatattgcccgccgtcgtcatttgtttcacccggattgagtccaccaagccttggtggtacatgctgggtctgcgggcggccaatattctgttatccatgatgattattctgctgatcgccgcgttattctataaggactacgcttcgctgattcgcaataacaaaagcatcgttaaaatgctcacgccgtccaactacgttagcggtgtgattgagtatgccaaacacaaatatttcaccaataacctgccactcattcgtatcggtgaagacgcgcataaaggcccgcagattttggcgcaacagaaaaaaacgctgatgatactggtggtcggcgaaactgcgcgcgcagagaacttctccctcggcggttacgaacgggaaaccaatccgcgtctgaagcaggatcaggtgatttattttaaaaacaccgcgtcctgcggcaccgaaaccgccgtgtccgtcccctgcatgttttctaatatgccccgtaaagaatacgatgcgaccctcgccagccatcaggagggtttactggacattgtggcgctcgccggggtgaatgtgctgtggcgggaaaacgacggcggctgtaaaggtgcctgcgatcgcgttcctcatcaggatgtgacgcagttaaatctgacacagtactgcgaaggtgatgtttgtatggatgacgcactgctgcataatctagacaattatatcaatgggttaaaaggcgacagtgtaattgttttacatcaaatggggagccacggcccagcctattatcgccgtaccacgccggaatttcgcaaattcacgccaacctgcgatagcaatcagattcaggattgcagcccgcaagagctggtaaatacctatgataattccttgctgtataccgatgcgacgctggataaaaccatcaaaattttgcagcaacacagtgatacatttaatacggcaatggtttatctgtccgatcacggggaatctttgggtgaaaacggcatgtatctgcacggaacgccctacctgtttgccccaagccaacaaacgcacgtgcctatgttgctgtggatgtcagcggattatgaaaagaatttcgccatcaatcgcaactgtttaaaccaaatggcgcagcaggctgaggtttctcaggataatctgttccataccattttagggatgatgaatattcagaccaaagaatatcagccttcattggatatactgcactcttgccgctcacctgcctgatggaaagagattaacgcttaaaatgatgaccgctgatgttcgccatcggcggttttatctgaatagcgggacaaagaccttttatcaaacctatgaatgataaggtgattatttaaaatcaccttatttacagcctcgaaaagctctcggtgtatctttttttcttgacctagaccagtcggtctattacgctaatggtcatgaacaagatattgcactctcaaactgatacccgcgaacatctgttagccaccggcgagcacctgagcttacgtctgggctttaacgggatgggactcagcctgctgctgactaccgctggcgtaccaaaaggttcgttctatcattactttaagtcgaaagaagctttcggcgaagccatgctgcaacgctattttgatcgctacgatactcaaatgcataacctgttttccaatccgcaaggggatcagcgccagcaccttctgggctattttgctcagggaattggcaatttttgcaacagtgagtgccacaacgcctgtctggcggtcaaactttctgctgaagtgagcgatttatctgagcctatgcgccacgcactggataccggcaccgctcgggtcatccgtcgcttacaggacgcgattgaaaaaggcattgaggagaaatccctgcgggtggttttatccgcatccgccacggcagaaacgctctatgccctatggctcggcgcctcgctgcgcgccaaagtgaaacgctccgtcgccccactgacctgtgcgttagaaagtatcgaattgctattacaaccgacagcctgatttaacagccactcatctcgcctgcgaggtaagtgtcttacacaaacactagacgactggtctattattacaggaattatcatgaagacagcaaaattgttctctccgctaaaagttggcgctgtgacgctgccaaatcgcgtgtttatggcaccgctgacccgtttacgcagcatggaaccgggtgatgttcctacgccgttaatggcggaatactacgctcagcgtgccagcgccggcctgattattaccgaagcgacgcaggtgtctttccaggccaaaggctatgcgggcgcaccgggtctgcatactcaggaacaaatggaagcgtggaaagagattactcaggcggtgcatgataaaaagggtcatatcgcggtacaactgtggcacgtaggccgcatttcacacagtagcctgcaaccgaatcaacaggcaccggtcgccccttcggctatcgctgcggattctcgtaccacggtgcgggatgaaaacggtgcttgggtgcgcgttccttgctcaaccccgcgcgcgctagccttagaagaaattccaggtattgtggatgatttccgtaaaaccaccgccaatgctcgcgaagctggcttcgatttcatcgaaatccacgctgctcacggttatttgctgcatcaatttatgtctccggcgtccaaccaacgtaccgatgcctacggcggcagcattgaaaatcgcactcgcctaacactggaagtggtagatgcaaccgccgctgaatggggcgcggagcatattggcatccgcatttcaccgctcggcccattcaatggtctggataacggggaagatcaggaagaagccgcgctgtatctgatcgatgaactgaacaaacgtaaaattgcctacctgcacatttccgaacctgactgggcggggggtaagccttattcagacgccttccgcgacgccgtgcgcgctcgtttcaacggcgttattgtaggcgctggcgcttacagcgctgaaaaagctgaagcgttgatcgaaaaaggctttattgacgccgttgcctttggccgcagttatattgccaacccggatctggtacaacgtttgcagcagcaagcgcccttgaatacgccggacggtgacactttctatggcggcggcgctaaaggttacaccgattatccaaccctataatgccgcgatttagctaaacatcttaatgccggtgagcgtttctcttaccggcattgctgtatttaaccgccatttgcgatttcctctcgagcagcacactcatcgatttacgccgcgaacgctgcgccccaatgttagagtgtagagaaatttgccagcgctgtgcggtattcgcctgactgggcttatcggggtatctgtggcgttcaggtgacgagtatcgcgcaacagcccatggaagaagctctgtcgcaacacatagtattggtgtttggttcaaagagtattcagagtcgcgacggaggtatccccagccagattgcagagtggatgaatcaccgtcgtaacaattaaacgccctgcatgacggtatgcccatccctttcccgacccgtggagtcagctgctgggaaagtcatgggcaaagacgacgctgaccgtctgatggggcgcttagcgccctttcttcttgcgaccgggctgggcaaaacgcttgcgggaagcggtgttatccgcgggtttttcgacgcttttcgggcggttaacgctcggttttttcgcggcagcaggcttggcctgcgcttttttttgccggtttctcgtcagaggaggaattttcaatcagcttgaataattcaatcaactcatcgtcggtcaaatctcgccactcgccctgcggcaaccctttcagattgacgttcatgatgcgagtacgctcaagtttggtgacttcatagccaaaatgcttacacatacggcgaatctggcggttaagcccctgcaccagcgtaatacggaacacaaaaggcgcttcttttttcactttgcactttttggttaccgttcccaacatcggcacgccggcagctaaaccaagaataaattcgtcagtcaccggtttgttaacggtcactacgtattctttttcgtgatcgttccccgcccgcaggattttattgaccaaatcgccgtgattcgtcaggaaaatcaacccttgggaatctttatccagccgaccgatagggaaaacgcgtttgctgtgattcacaaaatcaacaatattgtcgtgctcgccgtcttccgtagtacaaataatgccaaccggtttgttgagtgcgatcagtaccaaatcatcttcattacgcggctcaatcagctgaccgttaactttcaccacatccccgacataaacctgatcgccaactgaggctctcttgccgttaataaaaacatttccctgttcgacgtaacgatcggcgtcgcgacgagaacagatgccgctctcgctaatgtatttgttaagacgaatggatgagttggtcagcatagttcttccgaaaagggcggactataccttatccgcgccgggttgcgaagcctgtaaagcccgataatttaaatggtgcaggccccgtcaagtagtgcggtgccataagaattgtcgatagtacataaccaacgtccgtccggttcatggcgaaaaacgtaagtcgcttatcgggacgctgtcaccgatcctccctgtccgtcaggaaaatgcaacaccgtttcgatcatcaccaatgcatcgcccgatcctgcaataacctgcatttcgccctgctcaaccaccagccgatcctgaaaataatcggaaatagcaataaaagcccgacgaatattgtccgttcctctggcaatcatgccgggtttcgccaccagcgccgtatcttccgcatagtgctgcatcagtgcgtcaaaatctcggttagaaatcgccttatcgcaggtttcgatgattaagcgtatgggatgcgtggtcacggatttcgtccttataaagataaaggctgagcattcccttaccttggcacccttccggcatcatagctccctcaactacccgcctgcaggacagcaacatcgcctgaacgcaaaaatactgattacagcgtaggcaaaagaaatatcggctgccccaccagggtagtgagcaggaagatattgctatatcattgatgactaagtttgattcatgatcacttattattaattaattgataaaagaggtatttctatgcgcttacttcataccatgatccgcgtcggtgatttgcaacgttccatcgatttctacaccaaggtattagggatgcgcttactgcgtaccagtgaaaatactgaatataaatactcgttggctttcgttggctacagcgatgaaagccaaggttcagtcattgaactgacctataactggggcgtagacagctacgaaatgggcaccgcattcggtcatttggcgctgggcgtagacgacgtagcggccacctgtgagcaaatccgtcaggccggtggcaaagttacccgtgaagccggcccggtaaaaggcggcaacaccgttatagccttcgttgaagatcccgatggctataaaatcgagctgatcgaaaataaaagcgccggtcagggtttaggcaattaatcgagctgccccgtgctaaaagcgcccgaaagcaatttcgggccgttgacgtgcaatagccgcgaataggaaatagaaggtcactggcgttaaatctgatgagagttcccgctcgcacgttcatacttgcagctaacgcctttacttccctgattttagagcaggttttgatcgcgatccggcttcaaccttggcgtctccccctcttctgatgattcctcctgcatcgcgcggaaaagtttgacataatgcgcgcaatattcgaatgaagataagaaactaatggcagaaaaaagtgatgttaacgccctgagtggccgttttcgtgggtattacccggtagtaatcgacgtcgaaaccgccggatttaatgccaaaaccgacgcattgttagaaattgctgcggtaaccttacaaatggatcaggacggttggctaaagcgggatgaaactctgcatttccacgttgaaccttttgaaggcgctaatttgcagcctgaagcgctggcgtttaacggcatcgacccaaccaatccgctgcgcggcgccgtgcgggaatatgatgcattacacgccatttttaaagccgtgcgcaaagggctgaaagatcatggctgtaatcgcgctatcatcgtggctcacaatgccaatttcgatcatagctttgtgatggaagccgccgagcgtgccaaactgaaacgcaaccctttccacccttttgccacctttgataccgccgccctcagcggtttagtattagggcaaaccgtgttggctaaagcctgcctgactgcgggaattccctttgatagctcacaggcgcattccgcactgtatgacacagaacaaaccgcagaactcttctgcgaattggttaaccgctggaaacgcttaggcggctggccgctggctatcgctgacgaatcttgagtacaacggctccttccccgagacgaacgcccgactaaccgtcaactgcctctttaaacgaggcagttttgcgcggattgattcaatatcaaacgctcatcgctttaatcaattcgagccaaattctcttcgcttttttgtttgctatgacttgtccagatgactcaatagattatctctattacattcagtatccataaaaaattttaattttttctactcactttatatccgctactagaaatattttatttaatctattaaatatcgctttaaaataaataaaactcacatatggaataacaaaaaaatatcaaattagaactcataaattagatcaaaaaatgatggaaataagaaaagaattaaaagtcaccaccacaacatcacaaacaaagatccctcctagacaacaaaataatagcgtgataattttggcgggatattattcattaagatagcaggatgttattcatataagttaatacaatacatcacacagatagcattcttgatatcaactaaaacagctccaacgccaataaagcgcagtacagtgaactcaagccggttacaactacagcgcagatgcaccacaacctgtggaactccgtagtcttacggtcataaacgtttcttcacgaggaggcatacgtaagcaggatatatgctgggaaatagtgataattaatcaatgaataaatctgtggaaatcatactggcaataccaaaacaataatcaattggcgcagagaatagtaaaaacacgattacctcagcgtgactcaatatcttgaagaaacattaaccaatagaattcacctctaccgggtgatttttatttccctgatacgacacagttaatctatttaatggatcatttaattctatggataaaaaacatattaaaaatcagattttctcatgcaatgagacaacggcaataatccactcccctttagctaaaatatcggcgtttattattcttacctgcggcgtttctggcagcacctccgttctggccgaatacgcggaattggttagcggtgatcaggttgttagaacaggagatgttattgattcaggcgatcggcaagcagtggaaaatggcggtaaaagccaagacgcgacaataaatcaacggggcgtacaaattgttcgcaaacacggtacaacatatggaacgactataaataaggatggagtccagagcctgtatggcaatggaatcgccgacttcaccaccattaatcccggtggagaacaagagattgggttcagaggtctggctaaaaaaaccaaaataaacggcggcacacaaacaatccatgatgcgggattttccgcatatgcggtgatcgagcaagatggaacgcagtctatccaaaatgaagggttagcctacggtacgaccattgaaagcggaaatcagcatgtggcaaaaggaggtacagccgctcacagcacggtaaaaggccgcggcagactgaacgtaagcgccggtggccggcttacgggtaaaacactcatccttgaacagggaacgttaaactttacagccgaaagctcagaggatgttttacgcaatgacgggcaactgatatttcaacgcgatgattacactctggattttggcttaggcgggagcggctccagcgctgtggtacaaaatagtcccggcaacacattaaccctgacccaaccgagccactacttctcggaaacaataatcaagcaaggtaccgttaaagccgcagaaaaacatgtactcagcccaaactctcagtttgcaatccattctaatgcgactctggacttaggcggttttgatcaaaagcttatcgccctaaataataacgggacagtcaatttcggccattcagataaaagggggacgacattaatcgtcaccggtgactacagcagtcactttggtctgttgcacatgaacgcgacgttggcaggcgacagctcccttggcgataagcttattgtggaaggtaatacgtcaggccatacgtacgtacaggtgaacaatctgggcggcagtggcgcaaaaacgcttaatggcattgagttaattactgtagcgggcatgtctgacggtgtatttgttaaaaacagccgtattgtggcaggcagttatgaatatgacttacacagaggttcgggggataaccaatcgaattggtatctcagtagcaacatgactgatgaccatacgataggagtcgacgacgtcgaagctgaagaaagtagcctcgataccccgctggcccccattcccacactcaccgatgacgatgagctaatcgatgacaatgagctaacggacgaagagccagaaacaagcagcccagacaccccgcacgttgtcgatcctgaaataagtgtctctgaaataaatgataatgatattgacgcattacctatcacagatccggaaataaacaatcccaataccactcccgtgtcagagatacccagcattcccgccgggtctgatgcagatcctgatgtggatacgaatgtcatgaccttacgcccggaagccgcagcctacggcgccaatctgtctgcagcgaataatctgtttataacgagtctgaatgaccgtttaggcgaaacacactacacagacgtacatacgggagaacggagagccaccagcatgtggctgcgtaatgaaggcggacaccaacgcacccgcgaatcgcaggggcaactgagcagcctgactaatcgctatgttgtgcaactgggaggcgatattgcccaatggagtgataatgcctgggggcatttccggttggggattatggctggttacggcaacagcaaaagtaaaaccgaatcccgagtctccggttataacgctcgttcctccatcgacggctatagcaccggtttatacagcacttggtatgccaacagcgaagaaaaaagcggtttgtatttagacagttgggtccaatatagctggtttaacaacagtattagcgggcaggaactggcaaccgaaaggtacaaatccaaaggtctgaccgcatcagtggaaagcggttataccttcaagctcgcgggaaacatggccagaaatgccgcgtactttattcagcccaaagcacaaatgatctggatgggcgtcaaagccgatgaacacaaagaggaaaacggcagctatatatccggtgtcggtcaggggaacatccaaacccgtctgggggtgaaagcctttatgaacggctacagcgatttggataaaggtaacaataggattttccaaccttttatcgaagccacctggctccacaataccaaaagcttcggtacgaccttggatagcatgacggtacaacagagtggaacagccaatattggcgagctgaaattgggcgttgaaggtcacatcagtgaaaagcttggcctgtgggggaatgttggccagcagataggtggacagggatatagcgataccgccgtcattttaggcgtcaaatatcaattttgatccatgagtcactcatcaacattctggtaatcaaaccaatatcggttgttcagtatagaactctctaatcagcggcaataaaaatgggtggccttggccacccattttttacgttctaacttatcagataatcgcgcgcttattcagccgcctgatcttcctgtgaacggtatttgtcagcggtttcttttaataattgctgcaattcgccacgttgatacatttcgatcataatgtcgcagccgccgattaactcaccgtcgatccacagctgtgggaaagttggccagttagcgtattttggcatttcagcgcgaatatccgggttttgcaggatatccacataggcaaaacgttcaccacaggcagacagcgcctgtacagcctgagcggaaaaaccgcagctaggcaatttaggcgagcctttcatgtacagcaggattgggttctctgctacctggcgctgaattttttcaatcgttgtcatctcttgcttcctcaagccatattatggctaacactgacgtcattgcgcttagccgtaataacaatctatttgttgcgttcaggttattgtaacgactgtggcgccccgaataaaacgccattttttgcagggttttatcacatcgcgcctatctgaataggctccgctacataaatactcattgagaataacatttttacttcagcaaattcaggaatatcttttatagcccccgattccaggatgaaagctaacactatgacaaatggttatttatgacgcattagctgcataaaaaggcggcaattgacaagccattaacgttttctcacaaaatctattagaatcatatagctctccgcttttttatacggcgagtttcagcaatactgtgagtcttccatcatccatttcagggtcaaggttggtagcgttattatgcgtttattcttcacgctctttgtgctgctgtttacccagctatttttaaatctggcacatgcttcgccgcaggcgcgcgtatctgccgaccagaaaaaaagccatgtgagtcaggctagccctgacgatcgcaaaaaacggaaagtcgataataaaagcagcagtaagaaagttaagccagtgacccaaattaaaaagaaagttacggctaaaaccgcggctaaatcgacgacgggtaaagtaagcaaaaccaaaacaaccgccaacgcgaaaaccttaacccaaaagaaaagcgttacggctaaaaaaaacgttacccgtaaagaaacgaaagtggcttatgggcgacatcgaaatagcacgagcaaaaaagcagcggcagaattactcgcgaataacaaactaaaactcagtccggcacataaaaagcgctatcagcacgccaaacagacggcgatgagtaagctgatgaaacaagttgggaaaccctatcgctgggggggatcttcgccgaataccgggtttgactgtagcggactcatttattatgcctacaaagatgtggtcagaataaaaatgccgcgcaccgcgaatgaaatgtaccacctgcgcgatgccgcgccggttaaacgcgcagagctggaaagtggcgatctggtgttcttcaatattgctaatcgcggcgtcgccgatcacgttggagtttatttaggcaacgggaaatttatccagtctccgcgtaccggcgaagaaattcgcatcagtatgttagataacgattactggcaaggccattacgttggggcgcgccgcgtcgtgacccctaaaactattcgctaaaactatttgctaaacgtactcgttaaaatcatgctctcaaactttcgctccgccggtttattggccgtcggagcgtttctacccggctctcagcccctgtgttccaccaatcgaataacccatcgccaatcactttaactctgtgtggttaaacctggttttccagtgggaaattgataatattgatacccataacaactatatgacaattatttatccgctcgtcgccaccgggatcgccctggcgcatccggtgatttgatgggcaaacaccctgagtcatcccgaaaggagaaagcaatgtcttttgaattacctgcactgccttatgcaaagaacgcccttgagcctcatatctcggcagaaacgctggattatcactacggcaagcaccacaacacctacgtggtaaacctgaataatttgattaaagataccgagtttgctggtcaatcgctggaagagatcgtaaaaacctccactggcggtatcttcaataacgccgctcaagtatggaatcacaccttctactggaactgcctggcgccaaacgccggtggcgaaccgaagggcgcagtagccgaagcgatcgccgcatcttttgggtctttcgcggagttcaaacaacagtttaccgatgctgccgtgaaaaactttggcgcgggttggacctggctggtgaaaaaaccggacggctcgctggcgatcgtgagcacttctaatgcagcaacgccgctaaccacttcggataaaccattgctgactgtcgatgtgtgggagcacgcttactatatcgattaccgcaatgcgcggccgacttatctggaaaacttctgggcgctggttaactgggcgttcgtagagaaaaatctggcctgattagctggctaatatcaagggcggataacggctccgcccttctcgctcaaaatctgtacagctctaaaacagtcagggtttagttcattaccgctgtaaagctaaagatcataatcactgccaacgaaccaatagtagtaatcaatgacattttcagatcagtatccatataaactcctcagtcggttaatttgggtggataaaggcacatagttagtgtgtaaaacgattttcccacagttcgagaataaaatcttgttatcattactcactttataacgttgattagatctttcactttttctttaaatcggccaaaatccgcagttcattactgcgtaccgaccaataacgcctaaaaacccctttcagactagcgcgctgacgaaaataaccagcggaactgatgatatctgtctgaaagggttcgaacaacgcaggcaaacgattaacataatacttacctgctgtaacaggtcagtttaggagtcattctttttatggcaacgattaaagatgtggccaaacgcgcgggcgtttccaccaccaccgtttcgcacgtcatcaataaaacacgtttcgtcgccgaagacaccaaggccgccgtgtgggccgccattaaagagctgcactattcgcccagtgccgtcgcacgaagcctgaaagtcaatcacactaaatcgattggtttgctagccacttccagcgaagcaccctattttgcggaagtgatcgaagcggtagaaaatagctgctatagcaaaggctatacgctgattttgtgtaactctcataataatctggataagcagaaagcgtatctggctatgctggcgcaaaaacgcgtcgacggtttgctggtaatgtgttccgagtatccagagcaactgttgggcatgctggaagattatcgcaatattccgatggtagtcatggattggggcaccgcgcgcggcgattttaccgactccattattgataatgcctttgaaggcggttatttggctggccgttatctgattgaacgcggtcatcgcgatattggagccattccggggcaactggctcgcaatactggcggtgggcgtcatcagggctttatcaaagcgttggaagaagccaatattaaactgcgtgatgaatgggtggttcaaggggattttgaaccggaatccggttataaagccatgcatcaaatcctaacgcagaaacatcgcccaaccgcggtattctgcggcggcgatattatggctatgggcgctatttgtgctgccgatgaattaggtttacgcgttccgcaggatatttcggtgatcggatatgacaatgtgcgaaatgcgcgctatttctcaccggcactgaccactattcatcagccaaaagaacgtttgggcgaaagcgcctttgcaatgttgctggatcgcattgtcagcaaacgtgaagatccccaaaccattgaagtacatccaaaactggttgaacgccgttctgttgctgatggtcctttccgcgattatcgtcgttaaaaccgctgtgggaagccgtttagcccgttgaaacggcttcccgcgtgttttctacaccgtcccccgctcgcagccattcggcattcagcgtttccgtatccccaaggtactccagcagccacgccatagcgggcgaatggttgttttgctcccagctcaggcagcaagggctatctggcaagggctgagccagcgtaataatcaccagtttcccctgtttggccagcggctcgacgcgatgcgccggaaccataccaatacataaaccgtcacacagacagtcaatgcccgtttgccaatccggtgccaccagccgtcgctggttgtccagcgtccaggtatcgcgcttcggcagattacgggcagtgtcctcaatgcagagcgaagggtaaggccgcagctgatcgtcggtcaaagggccgctctgagatgccagcggatgagtggcactgaccacgcagtgccagttcataaaccccatatcacggaaggtaaagcgcccaccgactggcaccgcacgcgtcgcaccaatagccacatcggcacgaccatccgccagcgcatcccacacgccgttgaatacctcaaaatgcacccgcagttcgatatcggggaaatgacgataaaaatccagcaccaactgacggctgcgtaacggcttcacaataatgtcgatagcaatatccagatggccgcgccaaccgttagcgacctgctgacattgacgacgcgtatcaatcatttttttgataacagttcgcgcttctttaataaacagcgctcccgctgccgtcagttccacatcgcggtgtcgtcgttcaaacagtggcactgccagccatgtctcgagttgtctgaccgtatagctgacggcagaaggcacgcgatgcagttcttgtgcagcagcgctaaaactaccggttctggcaaccgcatcaaccacttccaatgaatattccgaccacattgccttgccttcaattattttcacaccagtatgcaaatattaccgtttcacaggggaatagccagccggatagaatgccccccgcattaattctcctgcaaagataacctgctttcggattgtagccaggcggcaacgccgcgaatcccaaggaaccgagccactaagtgactggggtgagcgaaggtagccaacaccgctgcggttcgaaagataacgggtatacagataaacgagataaataacgaaaatgaaaacatccactagctttatgttctacctcgccggtctgagcatgttgggataccttgccacggatatgtacttacccgcttttggcgccatgcaacaagatttgcaggcttcggctggctcgatcagcgccagtttgagcatttttctcgccggatttgccattgcacaattagtctggggacctttatccgataaattggggcggaaacctgtgttgttgctcggtttaagtctgtttgccttcggctgtttgggaatggtttgggtgcaaacgccggtacaactgttagcattacgtctggttcaggccgtgggagtttgttccgctgcggtgacctggcaagcgctggtgattgaccgttatcgcgatggcaaggccaatcgggtctttgccactattatgcctttggtcgccctttctcctgcgttagcacccctgctgggcgcctggttactgaaccactttagctggcgcgccattttcgtggtgctattggcgattactctgctgctgttgattccgactgctttattaaaagaaaagcaaaagaatgcgcaaagtagtgagagcgagaaagataatcttaacttctggcagattattaaatcgccgctattcagcggaaacgtgatgattttcgccgcttgcagcgctggtttctttgcctggctaaccggctcaccctttattttgggcgatatgggctatagcccgaatgtgattggcctgagctacgtcccgcaaaccctggctttcttgctgggtggttacggctgtcgcagcgcactgaattacatgaaaggcaatactctgttaccgtggcttctggttggttacgctttaagcatgatcgccctgtatctggtggcgaccctaacagaacctaacctgctgactttattaattccattctgcgtgatggcgctggtcaacggtgcctgttacccgattgtggtgtcaaatgcattaattccttttcccaataacaccgggaaggccgctgcattgcagaataccctacagctgggaacctgttttattgccagcatgttggtgtcagcctttattactcaaccgttattagccaccgtgaccgtcatggtgttgacggtattatttgcagcgctgggttatttcatacatttatatgccacaaataaggatgactctgataatcaaagagaattaatctcagagagtcatcattcctaagggaaattatttcagcctttctaacgcgccgagacagatttattattgagaaacctttccggcgcgcctatactcgatcccagttataaataaagccgttagaaaaaagtcatattagtttcatattttgtacacgttgatcgcgttacatttatccttaaggatgagtgaacctagtgccaaacgcagtagatttacttcttaatcttcctctgtccgtagttggatatcagacaccaaggtagccaatacctattcggtatgcgcctgcaattttttcgtttattgcgggacatcagtcagaagaaagtgatggagaaactatgagttcatcctgtatagaagaccaaagtattcaagaaaatccgtggtatcgcattgtgaatgaaatgttgagccaggccgatattgaaatcaatggttcaagacctttcgatattcaggttcataatcctgatttctttaagcgcgcattgcagcaaggctcgctgggactcggggaaagttatatggacggatggtgggactgtgaacgactggacatttttttccagcgcgtgctacgagccggtctggaaaagaaactcccccgccatttcaaagataccttacgcgtcgcaaccgcccgcctgactaacctgcaatcgaaaaaacgcgcctggatcgtcggcaaagaacattacgatctcggtaacgatctgtttagcagaatgctagacagccacatgcaatattcctgcggatactggaaagacgccgccaatctggaacaagcgcaggaacataaactgcgcatgatctgtgaaaaactgcggctgaaacccggcatgaaactgctggatatcggctgtggctgggggggattatccgcttttgccgcccgtcattatggcgtttccgttcagggcgtcaccatttctgccgaacagcaaaaactggcgcaagagcgctgcgccggactggatgtcactatcctgctgcaagactatcgagatttgcatcaacagtttgaccgcattgtttccgtcggtatgttcgaacacgttgggccaaagaactatccaacctattttgaagtcgtcgaacgcaatctaaaacccgatggtctgttcttgctgcatactattggcgcgaaccgtagcaatctgagcgttgatccgtggattgaccgctatatcttccctaacggctgcctgccttcgattcgacaaattgccgacgccagcgagtcgcggctcattatggaagactggcacaattttggcgctgactatgatcgcacgctgatggcgtggtacgaaaaattccgcgccgcgtggccagttttgtctgaaaaatactcggaacgatttgagagaatgttcagctattacctgaatgcctgcgccggtgcgttccgcgtcagagatattcagctatggcaggtattgtttagcccgcgcggcgttgatggcggtctccgcgttcctcgctaacgtctgattcacgggatcaaaaaaagggatacggccaaggctgttatcccttttctttttttcaggccgattaaagcagcatttgctccacagcgcggcgcttgcttcgattcagcgctgtaatgttaagattgcgctttagccgccatgtcactggccaaatgcgccgccgcgccggcgatatcccgctgagccaatatacgttctaccgtttcgaccaccgcctgggtttgcggatcgatttcaatattgacggtctgccccaaacgttttttgcccaaagtggtgcgttccagcgtttccggaatcaaatgcacgcagaaacgtttcccttctacttcgccaatggtcaggctgatgccgtcgataccgataaagcctttgtgcaacacgtatttcatcaaatcttcacttggcatacggaaccagatctggcgattattttcagacgtgtagattttggcaatctcggcggtgcaggtaatgtggccagacatcaggtgcccaccaatttcatcgctgaatttagccgcgcgctccagattcaccatatcgccaacctgtagctgacccaaattggtaatgcgcagcgtttctttaatcaaatcaaagctgaccaaatcgccttccaccttggtcaccgtgaggcagcaaccgttgtgagacacagatgcgcctaaagccagctctggcaacatatccgtagggaatttgatgacgtgggtgcgaaaattggccttttcatcgatggccacaactggcgcggtggccttaacaataccagtaaacataggcaatgcctcttattcgttatctatagcgaggaaaattatcttgattgacctcagtttgccctagaaaaaccggaaaaccaattcgcgaaaggtaaaaatctgcaaggttatctacttcgttgataataagttacaaatgattgcttaagcttttagagacggtacaatatttgccctcaaggacgatattttatcatcgtaactattagcctgcttaatcccaacattattagaaaggtgtgtacttgcaaaagtatctaacagaagtccgctgcttattagcgctggctattccggtggtgatcgcctcggtatcccaaactgccatgggggtggtcgatactattatggccggctcggtcagtgccaccgacatggcggccgtcgccgtcggtacctcaatctggctccccgttatcctgttcggtcacggcctgctcttggcattaacgccaaccgtagctcaattaaatggctcaggtcgccgtgaccaaatcgctcatcagattcgccagggcttttggctggcgtcgatattatcggtgctgattatgactctgctgtatcacagcgaccatgtcatcacccgaatgcataacatcgatccggtcatggcagaaaaagccgtgggcttcttgcacgcgattctgtggggcgcgccgggttatctgttcttccaggttttgcgtaatcagtgtgagggattatccaaaaccaaaccggggatggtgattggttttcttggcctgctggtcaatatccccatcaactacatcttcatctacggtaagtttggcgcaccggcgctgggtggcgtgggctgtggcgtggcgaccgccagcgtgtactgggtgatgttcctgatgatgcgttggtatgtgaccaaagcccgttcacagcaggatatcaagctggaaaaaggcttcgcaccaccggattggcatgtaatgaaacgcctgagcggcctcggtttgccgattgctctggcgctgttttttgaagtgacgctttttgccgtcgtggcgctgttggtctcccccttggggattgtgccggtagctggacatcagatcgcacttaacttcagctcactgatgtttatgttacccatgtctctcagcgtagcggcaacgattcgcgtaggacatcgtttgggcgaaggctctgttgcagccgcgcaggtttcggcttataccgccatcgccgtcggcctgtgtctggcgatgatgacggcgatatcgaccgtgatattccgcgaacaaatcgccctgctctacaacaaatcgccggaagtggtgattatggcgtctcatctgatgctactggcggcaatttatcagctgtctgacgcggtacaagtgatcggcagcggcgtacttcgcggctataaagatacccgttctatcttctttatcacctttacatcttattgggtgttaggtttgccgagcggctatattctagccctgaccgattatgtggtcccggcgatggggccaagcggtttctggaccggtttcattatcggtctgaccgctgcggcgattctgatgacattgcgaattcgttggctgcaaaggcaacccgccgagtttattttgcagcgtgccgcacattaaactcgtcgcagttatgattcgggaaataaagttctaaaaaaacctgcgccgggttattccgcccggtgcaggaaaatccgaatcaaagctggagaaaaaaacgtcgcaatgagcgaaagctcagcaatcgcgtgaaattacgaataaaattgcgtttttctccttgccagaggacgggctgcccgttaatattcgtccccgccgtcacctttgatggccggtaataatcgatgcgtccgtagctcagttggttagagcaccaccttgacatggtgggggtcggtggttcgagtccactcggacgcaccaacattattatcaagcattggcagtagattgaatgatatgcgtccgtagctcagttggttagagcaccaccttgacatggtgggggtcggtggttcgagtccactcggacgcaccattcaaacatcagattgacaagattattcagtgcgtccgtagctcagttggttagagcaccaccttgacatggtgggggtcggtggttcgagtccactcggacgcaccaaatcttgattcttaccgcgctttctcattcattcttctcattctcaaccgctattctcatgacccgcaaaatgcttcaattcgtttttccaagttcctgacgatccagcgcattcacctcgattttattcgctgtatagcccctaatgtcacataaaatttacactctgtatgcttaatcactgactgttgcgcaacaaatcgcgccgagcgcctcagtttgcgctacatttgcgtgatttttatcaaaactggtgatgagaatttgattttcatttcatttccggtcacttacgccgtataatacgaaccgtcgtttcagttgaatggtttcagcatcttgatctatagatacgctaaaaaaatacaactcctcaattggctgtcgcagacaggcccagcgcgaagtcctgcgcaaaagttttccgctcgatctcttcaactgtcacctattcttagtattgtttcattacaccagacacgccccacattccgttccgtcagcctagctggcggattctttcgctttttatccatcacaacttgtagaaaaatccgtcatgaaaaagactaaaattgtttgtactatcgggccaaaaaccgaatctgaagaaatgttgaccaacctgctgaaagcaggaatgaacgtcatgcgtttgaacttctcccacggtgactatgctgagcacggtcaacgtatcaaaaatatccgtgcggttatggagaaaaccggtctgaaagcgggcatcctgctggacaccaaaggcccggaaatccgcaccatgaaactggaaggcggtaaagacgtggcgctggttgctggccagaccttcaccttcaccactgaccagagcgtgattggtaacaaccaaactgtcgccgttacctacgctggcttcgccgctgacctgaaaatcggtaacaccgtgctggttgatgacggtttgatcggtatggaagtgattgaagtcactgaaagcactgtcgtttgtaaagtactgaacaacggcgatctgggcgaaaacaaaggcgttaacctgccgggcgtttccatccaactgcctgcactggctgaaaaagacaaaggcgacctgatctttggttgtgagcaaggcgttgacttcgttgcggcttcctttattcgtaaacgttctgacgtgctggaaatccgtgagcacctgaaagcccacggcggcgaacacattcagatcatctccaaaattgaaaaccaggaaggcctgaataacttcgacgaaattctggaagcgtctgacggtatcatggttgctcgtggcgacctgggcgttgaaatcccggttgaagaagttatcttcgcgcagaagatgatgatcgagaaatgtaaccgcgcgcgtaaagtggtcatcaccgccacccaaatgctcgattccatgatcaaaaacccgcgccctacccgcgcagaagccggcgacgtagctaacgccattctggacggtaccgacgcagtgatgctgtccggtgaaagcgccaagggtaaatacccgctggagtccgtgagcatcatggcgaccatctgtgagcgtacagatcgcgttatgcctagccgcatcgaatcactgaacgacaaccgcaaaatgcgtatcaccgaagccgtttgccgtggtgcagttgaaaccgcagagaaactgggtgctccgttgatcgtcgttgcaaccggcggcggcaagtcagccaagtcggtacgtaaatacttcccaaccgcgactattctggcgctgaccaccaatgaagtgactgcgcgtcagttaattctgaccaaaggcgttatcccttccgtcgtgaaagaaattgcttctaccgatgatttctaccgtattggtaaagaagcggcattggcaagcggtctggcgcagaaaggtgacgtagtcgtgatggtttctggtgcactggtaccaagcggcacgaccaatacttcttcagtacacgttctttaatccaactcgggttgttctgctgaatatatttaaacgccgcttattacagcggcgtttttcttttatctttttgttcccgtcctttctcaaaaaacatttaatcccaccccggttacaggctgttttataaataagacttgtcccatggagtacattggttttgtttttattttttaacgattttttaaaaccagacgcttctttgagcgaacgatcaaaataaagctcattaacataaaaaatttattctctttcgaaaaaagtttgtgtaatacttgtatcgctacatggagattaacttaatctagagggtgttaataatgaatcgtactaaacttgtactgggcgcggtaattctggcttctactatgctggctggttgttcaagcaatgctaaaattgatcaactgtcttcagacgttcagactctgaacgctaaagttgaccaactgagcaacgacgtgaacgcaatccgttctgacgttcaagcagctaaagacgatgcagcacgtgctaaccaacgtctggacaaccaagctcacgcttacaagaagtaatattacttcaatgaaaaatggcgcacattgtgcgccattttttttaccccgaacaatcccctcaccttcgtcatttgcactttatccttatccggtaagtcgatttatttatctgctggaacaatgaaagcatccttgctttcatcttgtcccgcaacgtcgaggcgtttatttgcggtgattagtgggactcagaatagattgggcctggctgagtaagcttagggatagtctgttcttcagcctgtgacgcttccagaggggctacagcagccggagcggcatcagaggctaccattcctttgctggctaatactggcatcccagaacggcgtacaatcgcactttcaaccactgcggtatctgtctcgccatcggccataaaggctttcacaccggcactcagcgcgattggcatggtttgcggatcgtcattgtctgtacgggacagcggctggtgaacttctacgtagcgtttaccgtccggttcaacagaatatttgatcggctcattgataatctgtacgcgggtgcctttaggtaccgagttgaacagcgcctgaatatcgtcaggacgcagacggatacagccagagctaacgcgcatgccgataccgaagttagcgttggtaccgtgaatcaggtactcaccggcaccggcagacagacgcatcgcaaacagacccataggattttccggaccggcaggaacaacggccggtaaagtcacgccttgcgccagatagtgcttacgaatattcgccgttggcgtccaggttggattcgggattttctgactgacggaggtcgtcataattggggtgttacgccctaactggccgataccgattggataaacgatgactttatcctgaccttttggatagtagtacagacgcagttctgccaggttaatcacaatgccttcacgcggggtgtctggcagtatcatttgcgttggaatggttaacactgaacccggcttaggtaagtacggatcggtgcctgggttggcttccagcatacccaatagaccgattttataatcggcagcaatagcctccagcggacggccatcgtttggaacggtaaaggtagtattttcaccaataagacgactattggccggtggcagaggatattcagttgcattggccgcagtgatactgcctgccatacaggtggcgaataacatacctatcaaagttaatgcacgtttcatgcttagttcctacatcacttcttcaaattcggtttatacggcgagctagttcgtgtgattttcatagccaataattggcaaaactatactaacagtaatgattctaaaggcaatttatttctctaaaaatcaaggtgttagaaattaatttttctttgcctttttcgccccccagacaagatttaacctgctgaaatatcaccgttttaacactgtgactgacttcgcaaaaatatttttataacaattatgggtgaatagattaataaatgattaagaaggttctgagaggcagacacgctgcctcggaagaaaggtcactcagactaataatgatgctttattacgaattgcgcgaatcattgcttccaatccctgggatcgagatggcgttaaatgctggcttagagccaaatcggcaaaataagggcgaacgtccagatcgataatttgctgcggagttaacccctgatacagaataaagacgaccgcaactaacccttttacgatagtcgcatcgctgtcaccggcaaaatgaatagtgccctgctcggtcaaggtcaaggtcatgctgatccacacctggctctggcagccgctaatcaggttttctggctggcgctcggtgtcgctcaacggcggcaacatagcgcccaattcgatcacgtacaggtatttttcttcccaattatggcagcgggaaaaattgcgaatcaatttttgcttatctggcaacgtggccatggagaggcttcctaatacggtaaaaaataaagctgaccaagacgctagccagctttgataacggcaacgctctgaccaacaggcgctgcggagtttggctttacttagcctagcaaacgcttgacccgttgtaaccccgccaccagccggttgatatcctctcggctggtataaaccgccagagaagcgcggcacatgctcggaacgccgtagtgctgcatcaatggcatcgcacagtgatggccggtacgaatggcaatcccgtactgatcgagaaaacttcctacgtcaaaggcatgatgttgccccagattaaaggcaatgactcccgcccgtgacgctggaccgtacatgattaccccttcaacctgctgcagtgcttcgacggcgtaggccatcagctcatgctcgtagcgctgtatgttatccagccccagttcgctcaggtagctcattgccgcgcctaaccccatcatacccgcggtgttcggcgatccggcctcaaagcgccccggcgcatcagcgtaggtggttccttcggtcaggctgacggttttaatcatcgccccaccgccttcccacggcggcatttgctgcaacagttcgctttttccgtacagaataccaataccggtcggtccatacagtttgtggccggagaaagcataaaaatcacagcccagtttctgtacgtccaccgcctgatgcatcaccgcctgagcgccgtccaccagcaccagcaaaccggcggccttggccgttgccacgatttgctcaatcgggttaaccgtacccaatacgttggaaacgtgagtcatggccagcaaacgagtcgtatcatcgatcaggtgcggtagaacgctcagatccaattcgccgctcgcggtaatcggccagacgcgaatttcaatgccgcgctcctgagccagcatctgccagggaacgatattcgcgtgatgctccatttcggtgatgataatactgtcaccagctttgaggaaatgtcgcccgtagctgtttgccaccagattaatagcttcggtggtacctttcacaaaaacgatttcatccggcgagttggcatggataaattctgccgcctggcagcggacttgttccatcgcctgagtcgcctcagcgctgagggtgtgaattccccgatgcaccgccgcatagccgctgcggtaaaactctagctcgcgctcaatcaccgcattgggtttctgcgcgctagccgcgctgtccagataggccagcggctggccgttgacttcccgggcaagcaatggaaaatcggcgcgaatgcgttccagcgggtaactcatagttgttctctcatcattattctcccgccagacgctcggcaatccgctccatcaccagtttacggatggtttcgttgctcatcgcttcggtcaattccgcagcgaaagcaaagataatcatttgctgagcatcggcctgactgataccgcgggactgtagatagaacagctgttcggcgtcaatccgcccgacggtcgcaccgtggctgcacttcacgtcatcggcgtaaatttccagctgcggtttggtgtccacctctgccagtttgctcaacaacaggttgttattggtcatctgaccgtcggttttcagcgcgtgctgtgccaccttgatcatgccgttaaacacggccttgccccgctcccgcaccacggttttatgtagctgacggctttcgcaatagcctttattgtgttccagataggttcgggtatcacaaacttcgcggccaataggtaacagcaggctgttcatcgataaacttgcgccctcgccgttaagctgggcgctggtgttatggcgagtcagaccggcacccagcaagaaactgtagcttctggcgcgagcgtcacgtcccatcaccacgtcattatgagcaaagtgatagctttgcggcgtttcaaaggccagcttgcagtggctcagttgggcattgtcgccgacagaaatggtcagccgcgcgccggtaaagtgaggcaaatcattcaggctgacataatgctcgacaatatcagcctgagtattcgcttccagcatcacatggtggcgatagtggctggtattcaccagctcagtatctgcaccagagctgatatgcagcagatatagcggtttttccgcctgttttcccgctggcagacgaatcactgtgccctcctgcgccagactttccgtcagatgcaggaatacctcagattgcaccggggcaggcaattcggaggcagcagtcagtgggctaaccagataaacaccgaattcggtatcgctcaggctggcgtcgaaacggccgtccacaaagaccagacgataggcgtctagcggcagcgccagcgcggttaactgctgtgagctaacctgtgtctgagcaaagccaaaacgttgttcaagcaagtggttaatcggcgtatatttccagtcttcatgctttgcggttgggaaacccaacctctgagcctgctgccaatggctatcggcacgcccaccgcgagcgccttgctgtaccaattgactcagttgctgcagtaccgtagcactgttctgatgcgggttattactgttggtcggtaagccagccatagccttgctcctccaactgtttgactagcgagaagtcaccggacttgataattttgccctgatacagcacgtgtacgaagtcgggcttcacgtaatccagaatacgttgatagtgggttacgatgatgaaagcacgtttttcattgcgtagagagttcaccccgttcgccacgatttttaacgcatcgatgtccagaccggagtcggtttcatccagaatgcacagatctggctccaacgccgccatttgcaggatgtcattacgttttttctcaccgccggagaaaccaacgttcaccgaacgagtcagcaaatcttccggcatcttcaacagttcaattttttcttcaatgaaatcggaaaaatcgaagcgatctaaaggttcttcttcacggtatttacgtaccgcattcacggccgtttgcaggaagaaatggttactgacaccgggaatttctaccggatactggaacgccaggaaaaccccttcaccggcgcgttcttccggatccagcgccaacagatccttacctttaaagatcacttcgcctgcggtgacttcatattcttcacggccggccagcgtggcggacaaggtacttttacccgagccgttcggccccatgatggcatgaacttcaccgggtttgatttccagattcaggcctttgaggatctcgttgccttctacgctgacttttaaattcttgatgcttaacatgctgtttcctttgtgcgccgtggcgcaacgctgtgcggtgcaaatgccacgggattaacccacgctgtgttccaggctaatggcgagcaatttctgcgcttcgacggcaaattccagcggtaattccgagaagacatctttacagaatccgttgacgatcatcgagatagcgtcatcttcgctgatgccccgctgcagacaatagaacagttggtcatcgccaatcttggaggtggtggcttcgtgttccaactgagcgctgttgttgcgcacttccacatacgggaaggtgtgcgcgccggaatccggcccaatcaacatcgagtcgcactgggtaaagttacgggcattttccgcactcggtaggattttcaccagaccacgataggtattctggctatggccggcggaaatccccttggcgataatggtggatttagtatttttgccaatgtggatcatcttggtgccggtatcggcctgctgataaccgttggtcaacgccacggagaagaattcgccgatggagttatcgccctgcaaaatcacgctcgggtatttccaagtaatggccgagccggtttccgactgagtccacgacatttttgaaccttccccttcacacagagcgcgcttggtaacaaagttgagaatgccgccggtgctggccgtaccggcaaaccagttttgcaccgtggaatatttcacttcggcatttttgtgcagaatcacttccaccaccgccgcatgcaactgataggtatcacgcaccggcgcagaacagccttcgatatagcttacgtagctgtcttcatcggcaatcagaatggtgcgttcgaactggccggttttcgccgcgttaatccggaagtaggtagaaagctccatcgggcaacgcacgcctttcggcacgtatacgaaggtgccgtccgaagccacggcggcgttcaatgcggcaaagaagttatctttggcgggcactacactgccgaggtatttgcgaaccagatccgggaattcctgaattgcttcaccaaaagagcagaaaataatcccgtggccagccagtttttcacgataagtggtggcgaccgaaaccgaatcaaaaatcgcatctaccgccacttccgccccttcacgaaccggaacccctaactgggcaaaggcgttttccacttctgcggtgagataatcattggcggcggtgccgagatcttcgccgtcggtcggctgctgcactgcgccgggttgggaaccgcagttgtcatcgcagctaccgcaagatggtgccgagtaatagctgtaatcctgataatccaggctttgatagtgggctttcagccaatgcggttcttccatctccagccagcttcgataagcaccgagacggaattccagcatccactcaggttcgttacgtttggccgaaatcgctcgcaccacatcttcgttgatgcctttggccaactcatcggtggctaaatgggtaaagaagccttctttgtaacgaccatcactgacccaagcctgcacatcatctggaacttctacattgcttcgtgtcatttcgtttacatcactcaaacgccaaaactctcgccacaaccgcaggcatgctgagctttaggattattaaatttaaagatctgattcagcccttcgcggacataatctacttccgtgccatcaataaaaggcatcgcttttaacggtacaaaaattttggcttcgccatgctcgaaaaccagatcgtcattggcagggttttttgccatgtccatcacgtaggcaaacccggcgcagccggattgtttaacgcccagatgcagccctttcacttcgggatcttgctgcattaagcgggcaatctgcgcggcggcactgtcagtaatggtgacgccctgccaatcattgtcgtcgagtgaaaatgtaccaactgtatcctgttgcatatgacctaccttatctatctcaacaaccttattagttgttattatgctggttgaacctcactcggcgtcaacacagattgttcacaatggtagtgataataattatcacttcaaccgtttgttttgcagggatattaagaaaagtgcctttttaaccccgggtgaggcggcaacctataaggaacgctgcgatggccagaaaaaacggaagagagtcgcacaatattatcattatgaaatcacacaatatatttcataataataactgaaaaccctgcattattagaggccaatttccctttacttctaataattttaaacattcataggaaatacctatttctacgctaactttagccgaaaatccccctcggaggaaacctctacggcaaaaagtgaccgatttgatcgtgaaaaaataagccgttcgcgggtaagggattgaatgaaaggaaactgtgtctgacaaggattaagaaatattcagaaccggcgctgtccggttctgaaaataccgcttcagattaggcaaaatgaagacagacgctagctgcctaaaattgccgtagtgagacgtgatgtacagcaaagccgatcctgctgatcgaaaatctcgatctgccaaacctgatgagtacggccagcgtgaaccgcccgacacacgccgcgaaccaccccttcccgcaccgctctcaggtggttggcattaatttccaaccctaccacctgttgatcacattcggtggatagataacccgccattgagcccagcgattccgccaacaccacagacgccccgccgtgcagtaggccaaaaggctggcgcgtgcggtgatccaccggcattgtcccttcgatttcattgtccccgatgcgggtaatttcgatgcccaaatgggacaccatgcaaccttcacccacttgattcaagtctgccagcgtagctgctcgtttccaaagcattaaactatctccaatagagcctgtaacggatgcctgaggctatttccttccattcgttttacctggctacggcatgaataacccgttgccagacagcgtttttccggcaatttctgcaatgcctgctgccatgatagttcataaattccgatcgagttatggagattcttcgattcgtgaccgtaggtgcccgccataccgcaacagccaacgctgacgttttccagccgcgcgccgtagcgtgaaaatatccccgcccactgctgcccgctggccggtagcgcggtgctttcagtacagtggccaaacaaataccaaggttcatcgttcaatggctgcgctgggctatccggcaatgtcgtctgtaaccattcatgtaccagttgcaccttaaagtgaccgcgacgctctccaagcatttcctgatattcatcgcgatagcacagtaccaaggccggatcgacgcccaccagcggcatgcctaataaggaaattcgattaaggaactcggcggttttagtcgcagttttagcgaatcgctgtaaaaaacctttgatatgttgggctttaccattaggcgaaaacggcagcaagaccggattaaaaccgagtttttctaccaatcgaacaaaatcagccaccacctgtgcatcgtaataactggtaaaaggatcctgtacaattagcacatgatggctacgttcttcatcactcagtttttccaactgttccatcgtcatcgtgctggcatagtggccggaaagcgcctgtttcagggtcggcgtcgagagcagcggtaaatccaccatcccaatactccggcgactcagttcgctcacccacggctgtttcaggaagaaattgaacaggttgggcgccttggccatcagcggcgtatagctttccacgccagcgaccacgtaatcacgcaacggacggtgataacgggtgtgatacagctgcaggaagcgcgaacggaaccccggcacgtcaattttaatcgggcattgagtcgaacaggctttgcaggccagacagcctgacatcgcctccttcacttcatgggagaaatcgtagtcccctcgattggcgcgccagctatgtctggttttttcgatcagtccacgcaggctaggccggcgattagccaggccgttttccagtaccagaggatcgacgccctgttcgctcagcaaacgcagccattcccgcaccaatgtggcgcgacctttcggggaatgaatgcggttgccgctgattttcattgaaggacacatcgggctgcgagcatcgaaattaaagcataatccgttgccgttacattccattgcgccgcggaatgacgtgcgcaccgtcagcggaatttgtcgatcctttatgccgcgttttgccgaggtatcgactttcatcatcggcgcatcactgtctaacggagaacagattttccccggattcaggcgattgagcggatcgaaagcagacttaatgcgccgcagctcgtgatacagtttttcaccgaagaaacccgggctatattcagcgcggaaaccttttccgtgttctccccacagtaagcccccgtaacgcgcagtcagctcgactatccgatcggaaagctgtttcatcagcatttcctgctgcggatcgcacatgtccaaagccggacgcacatgcagcacgccggcgtctacgtgaccaaacatgccataactcaggttatggctatccagcaactgacggaattcgacgatatagtccgccagattttgcggcggaacgcaggtatcttcggcaaaaggaatgggtttagcctgacccttactgtttccgagcaatcctacggcttttttacgcataccgtagatgcgctcaataccggccagatcgtcacaaatctgatagccaatcacaccgccctgctgcgtagacatcaattcatctaaccgctgacacaacgaggccatttgctcgtcgataagttcccgatcatctccggcgaattcgacaatattcagtcccaatagcgtcttatctggcacatcggtgatcaattctttaactgaatgccacacaatgtcttctctggccagattcagcaccttagaatccaccgtttccaccgacagcgccttggcttccaccatgaaaggcgcattgcgcaaggccgaatcgaaggaatcatatttaacgttcaccaaacgccgcactttcggcagacgggtaatgtccagcttggcttcggtaataaaggccagcgtgccttccgacccgcatagaatacgtgttaaatcaaaagattgcagatcatcactcaaaacatggcgcagatcgtaaccggtcaggaaacggttcagtttggggaatttttccagaatcagcgcgcggttatcccgacaactctccagcacgctacgataaatacgcccaattaccgactcctcggcggcgatcgcttcggcctgagcagttggcagcgcgcgagtatccagcagttcgccccccaaaagcaccgctcgcagacctaaaacatgatcggacgttttgccatacaccaacgagccttgcccggaagcatcggtattaatcatgccgcctaacgtggcgcggttgctggtagagagttcgggagagaagaaatagccgtgcggacgcaaatattgattaagttgatctttaatcacaccggcttcaactcgcacccagccttgctcagtgttgatttccagaatgcgattcatatggcgggacatatccaccacaataccggtattcagtgcttgaccgttggtgcctgtgccgccgccacgtggggcaaaggtcaaagattgaaacgtcgattctccggccaaacgaccaatcagggtgacatcggcggtggatcgcgggaataccaccgcatcgggcagcaattggtagatactgttgtccgttgccatcgtcaggcggtcggcgtaatcggtggcggtgtcgccggtaaaaccgtgttgcttcaatgccttcaaaaagtccagcaccagcggtaagacgccaggggcctgagaaatccgtgggatcattatggttgaccctatctatgttgttttcacacacgccatccgccgcgcatcaccctgtcacatcagcgaatatacgtactccagtggcagaaaggttagccgcttgttaatgctcttgtcgaatcatttatgacaattcagaatgatgagaaaggcttggctcattgcagggaggaatagaataataattgattaacgatcaacattttatattgccctgccaacgaacagatcaactcgcatagagtgtaaaaaagcccacgtcagaaactttcaggcagcaaacgtcgcggtaaaaccggcgttgtaaaacacgaatacggggttggcataagaagatgtaaaccattccgcgccgctggtgccattagcgtcgagtctagctctgcggcattctctctctataacgcgatacctctgtgatatttctctcaatagaacgacatcgctgtaacaccggctattccccgaaccaaatgattcgcgaatgaatctacctcacaaaataagcgtgcttttattactcagctccgtcagtaaaaatgctatgaatctgttaaattacgcaaaaatacaccatgattagacagtcagtccgaatacggcgaccttgccctacttatcgaaacgagaactcaccgatgaattacccgcaacaacatcgttacgacttacccaaactcatatttggcgtgatattcattttgataatgatcattgccagcttctgggtggttcaaccctttattttggggttcgcctgggcgggaatggtggttattgctacctggcctttattgattcgtttgcaggggttactttggggacggcgctcattagccgttgtcattatgacactgctgttaattctgctgttcgttatcccaattgcgctgttggtcagtagcgttttggaaaatagcgctccgttaattaaatgggccagcagtccggcgaatttacagataccggaaatggcatggctaaaatctgttccgatgctcggtaacaaactctacagcagctggcataccctgatagccggcggcggcaatgcgctaatggcgaaagttcagccttacgtgggggaaaccgccacctggtttgtggctcaggccgctcacgttggccgcttcctgctgcatctgactctaatggtgttattcagtatcctgctgtatttccacggtgaaaacgtcgcactggggattcgccattttgccgttcgtctggcagataaacgcggcgatgctgccgtcatactggcggcgcaagccattcgggccgtagcgttgggcgtggttgttaccgcgctggtgcaagggattctgggcggaattggactggctatcgccggcatcccctacgcgatgttattgacggtagtgatgtttgtttgctgcgtcgcgcaacttggccccttactcgtactggttccggcggttatctggctgtactggagcggggacaatacttttggcactctgctattggtctggagctgcgtagtcggaacgctagacggcgtgctgcggccagtgctgatccgtatgggcgcagacctgcctatgatcctgattctgtctggcgttatcggcggtttgctctccttcggcatgattggcctgtttattggcccggtggttctggccgtctcatatcgcctggtgagcgcctggattcatgaagcgcctgagccggtagaagatgtcgccgaagtcgctaaacacttagatgaactctaatagcacaatggctcgttggtaatactggcgagccattattttctcattccctccttgcccaaataatagataaagctttaggttcaacactctccattcttttttcacgttaagaaactcaagtttattaaaacagcattgttattcactataaaaccgcccacactctttcatttagtcactgataaacaaccgtttttattaggatgattcttaatgactatctaacttattttatttaagattattattaatcgacaactcatttgagatgtttaaataaatcagtagattattgctttatcgcaatatcagcaccgaataccctaattgctgtgtgtagtctttgcctatctcctatgatgggcttttttttgtcttccgcgccaaataatgaattattgcctctcacccttatattcccaatcaaaaacagtttctaaaggttataaaattccagaaaaaaatccgcagcctaagctacggatcttcaaagaatgacgtaccttagatattaatgggttacaggtttaacctgccccaaatccatccaggtttgcactacggtatccgggttcagagacagactatcaatgccctgctccatcagccacagagcaaaatcggcgtgatctgacgggccctgcccacaaatcccgacgtatttaccctgccgttttgccgcctgaatcgccatcgacagcaaggctttcaccgcctcgttgcgctcatcaaacagctcagataccacgccggaatcacgatccagccccaacgtcagctgcgtcatatcgttcgaaccaatggagaatccgtcgaaatgttggaggaattgatcggccaataatgcgttcgaggggatttcacacatcataatgactttcaggccattctcaccacgtttcagcccttgcttagccagttcggctaccaccgcctccgcctgcgccacggtacgcacgaatggcaccatgatttcaacgttggttaaccccatttcgttacgcacacgtttgacagcttcacattccaaggcgaaacaatcacggaagctatcggccacgtaacgaccggcaccgcggaagcccagcatcgggttctcttcatgaggttcgtaggccgcgccgcccaccagattggcgtattcgttggatttgaagtcagacagacgcacgatcacgcgttttggccagaaagccgcacccaacgtcgaaatgccttcggtcaggcggccgacgtaaaactcaaccggatcgtcgtagccgtgcatcagcgctttaatttcagcctgcaacgccggttcctgcttatcaaattccagcagcgcccttgggtgcacgcctatcatgcggttgataataaactccagacgcgccagaccaaccccttcgtttggcaaacgggcgaagtcaaaagcacgatcaggattaccgacgttcatcatgatttttaacggtaactcaggcagttcggtcacttcggagctttgcactgaaaagtccagtagatcctgatagacaaagccggtatccccttcggcgcaggatacggtcaccttctggccttcacgcagacgatcggtggcatccccacaacccacaaccgcaggaatccccagttcacgggcaataatcgctgcatgacaagttcgccccccgcggttggtgacaatggccgacgcctttttcatgataggttcccaatcaggatcggtcatatctgtcaccagaacatcaccgggctgaatgcgatccatctcgctaatatcatgaatgactttgaccggacctgaaccgattcggtgaccgatagctcgcccttcaaccagcacttcgctctggttgttcaacaggtagcgttccatcacttgttcattggaacgaacggtttccggacgcgcctgtacgataaacagcttgccggtgtgaccgtctttggcccactcgatatccatcgggcgaccataatgctgctcaatcagtaaagcctgatgagccaaggattcgacttctttatcggtcaaagcgaaacgattgcgcagatcttctggtacatcttcaatacacacctgtttgccgtgttcttggctatcggcatacaccatacgaatttttttcgaacccatattgcgacgaacaatggccggtttgccattacgcagcgtaggtttgtgaacgtagaattcatcaggattaaccgcgccctgcaccaccatctcacccaaaccgtgggcggcggtgataaataccacctgatcaaaaccggattcggtatcgatggtgaacatcacgccggacgaggccagatcggagcgcaccatccgctgaacgccggcagacagcgccacgccgcgatgatcgtaaccctgatgcacccggtaggagatggcgcggtcattaaacagggaggcaaacacatgtttaatcgccaccatcaccgcatcgataccctgaacgttgaggaaggtttcttgttgacccgcaaaggacgcatcgggcatgtcttccgccgtcgccgaggagcgcacggcaaaggaggcttccggctcgccgtcggcaagctgttgataagcttcatgaatagcttgttcaaactcaggatggaacggcgtatcaatcacccattgacgaatctgggcaccggcgttagccaactgcgcgatatcatcaacgtcggtgttatccagcagctcataaatacgttggttaacgccactttgctcgagaaagtcgttaaacgcctcggccgtggtggcaaatccgttgggaacagaaacgcccagttcagaaagattggttatcatttcacccagggaggcattcttaccgcccacacggtcaacatcgtgcataccaagctggttgtaccaaagcacattacgcagggttcggccattgttcgacatctaaacaatccttttacattcagtagggtacgaataaaagttatctttgctgttaaacagcagggatcagactagcacaatgctccgttagctatggacaggtgaatcgatcaacccaacacaaaaaaattttttaagggcaattctgcggcaaaagctttacccaaaacgggaataaggcacactatcagacagatcacagatgattattcgggcagtggcttaaaggagtcagggtggaaagaagcgttttttatatttcagacggtaccgccattacggcggaagtcttggggcacgccgtgctatcgcagtttccggttgatgccacgacctttaccttaccttttgtcgaaagcgccgcccgtgctgaagcggtttgccagcagataaatgagatttatcagtctaccggcgtccgcccgctggtgttctattcgattatttcgtcggaagtccgcgagataatccaacgcagtgagggattctgtcaggacatcgtccagtcgctggttgcgccactccaggacgaactgggcgttgcgcctcagccggtgctcaaccgcacccacggcctgaccgaaagcaatttgggaaaatacgacgcccgtatcgccgctatcgattatgcgctggctcatgatgacggcatttcgttgcgcaatctggatcaggcgcaggtgattttgctgggcgtatctcgttgcggtaaaacgcccaccagtctgtatctggcgatgcaatttggcattcgtgccgccaactacccttttattgccgatgatatggataatctgcagttacctgcggcgcttaaaccctttcagcacaaactgttcggtttaaccataaaccccgagcggctggcagcaattcgtgaagagcggcgggaaaacagtcgttatgcctctttacgacagtgtcgtatggaagtcggcgaagtcgaggcgctgtttcgcaagaatcaaatccgctatctaaattccaccaattattccgttgaagagatatcgaccaaaatcctggatattttaggaatgagtcgccggatgttttaaggctgcattcatataaatgattgaatataccgaattcgatataaattctattaatctcctctgcggcggttgaattcgtctggttttggtttattgtgatcgccatcacttcccggtattcctgccgcagagaagaacatttttagagaatatccatgcataaaacagatgaactgcggaccgcgcgcatcgatagcctgatcacgccacaacagttggcggataagttgcctatctcttccggcgtagccaataacgtgaccgcgtcacgtaagcgcattgaaaaaatcctgaccggtgaagatcctcgtctattagtggtggtcggcccctgctctattcacgatctggatgctgccattgattatgctactcgcctgaatgtgctgcgggaacgctatgcagatcgactggaaatcgtgatgcgtacctatttcgaaaaacctcgcaccgtggtgggctggaaaggtttgatctccgatccgacgctagatggctcctgtcaggtcaatcttggcatagaattggcacgtaagctgttgctgagcgtgaatgaactgggattaccaacggccaccgagtttctggatatggtgaccgggcaatatattgccgatttaattagctggggtgccatcggcgctcgcaccacggaaagtcagatccaccgtgaaatggcgtcggcgttgtcctgtccggttggctttaaaaacggcaccgatggcaacacccgtatcgctattgacgccattcgtgcggctcgggccggtcatatgttcctgtcgccggataaaaccggccagatgaccatctaccaaaccagcggtaacccttacggccacattataatgcgcggcggtaaacaacctaattatggcgctacggacattgccgctgcctgtgatagcctgcgtgaattcgatttacccgagcatttggtggtcgatttcagccacggtaattgccagaaaatgcatcgtcgccagttggaagtcgccgaagacatcggtcagcaaattcgcgccggttctacggcaatcgtgggtgtgatggcggagagtttcctggtcgagggcacgcaaaaaatcgtggccggacagccgttaacctacggccaatccatcaccgatccttgcctgaactgggtcgataccgaacatttattagcaattctgaatgacgccgtgaatacccgtttctaacctgccccaaccgacaatccgcgttaatcattaatgcttcaaatttagccagttcagatgtcatcaggcatctgaactggttgattttttctgaattccctcaggcttcaacgctgacttttacatgaaataataaccccaattgttaaataaattgggctattcggctgtcgcctcgtcttttgcatcagaagcgttattttgtatataattttttctttttgtaattaatgagatagaccagagacagcaggaaatcaaaaaagttgtccaaggcaatattttgcttgatgtaacctcccattcacatgataatgattatcaaattgataaccatttccgtttgcatctaatgaataaccctacttacagcgatttgtaccctgcaacggctagcggagcagaagattctctcccgctggtggagcaacctgcttgcatcaatagcgagcaactgcttggtagacatggactcgtcatcatcaaccatcaaggacaattttatcagctgcggcagaccaaatccggcaagctgatattgaccaaataataactgctccttgagatactttttcgcgagccacccagatcgttcgatcgaggcagccagcaatctaatgattatgtttaactacatatggagaattgccagatgtctcgtgcttcatctacgttgttccgtgcgtcatcgctgagtttggctatcgcctgcgccattccttcgctggcctacgccgcgcctaccgcaccgagcgaatccgctgccacaacagaaacagccaagaaaaaagcggtccattccagtgaaaccatgaccgttgtcgccacgggtaacccgcgcagtagctttgacgcaccgatgatggtgacggttatcgaaggggattcgccgctcagccagacggccagcacctcagccgatatgctgcgtcgcgtgccaggcatcctgatttcaggcacgggacgtactaacggtcaggacgtcagcctgcgcggctataaccgtaacggcgtattgacactggtcgacggcatccgtcaaggcaccgacaccggccatatcaatagcaccttcctcgatcctatgctggtcaaacagattgaaatcgtgcgtggcccagcggccatgctatacggcagcggcgcattgggtggcgtaatctcctatcaaaccgttgatgccgccgatctgctggagccgggtcacagtagcggttaccgcgtatttggcttaggtgccaccggtgatcacagcttgggcatgggggcttctgccttcggtaaaaccgatgatttggacggtttgatttcctttggcactcgcgacgtaggtaatcttcgccaaagtaatggtttcagcgcgcccaatgacgaagcgattagtaacgttctggcaaaaggcacctggatcatcgatgataaccagtctctgagcaccaacctgcgctattacaataaccgcgcccgggagccaaagaatccccaaacgcccgccgcttccgccggtaacctgatgaccgaccgctcgaccattcagcgcgatgcacagttgagctataagctgcatccgcagggtcagaattggctggacgccacggcaacggcctactactccgatgtcaatattgataccaccaccaggggcaccggctttgaaggccgcgagcagaaaacccacggcgcgaaactggaaaatcgcactcgcctgttcgctgacagcgctgcatcgcacctgttgacctacggcaccgaagcctatcgtcaggaacaaacgcctagcggcgtcaccaccagcttcccgcaggctaaaatcaactttgcttccggctgggcgcaggacgaaattactctacgcgatctgccggtgaccgtgctggcgggtacgcgtttcgacagctacagtgccagcagccaaagcaatgccgatgttgacgcagataaatggtcgtcgcgcggtgctgtcaccgtaaacccaaccgactggctgatggttttcggctcttatgcccaagcctttcgcgctcctacaatgggcgaaatatataatgattccaaacacttctcgatggggccatttaataactattggaaacccaatccgaatctgcgccccgaaagcaatgctacgcaggagttcggttttggcctgaactttgatggcgtattagccgagaacgacagcctgaaattcaaggccagctattttgatacgcaggccaaagataaaattgagatgaaagtcgataacctcacgaccacctctattaatattcaccgcgccaaaatatggggttgggatgccactatggattaccaaaccgattggtttaactggaatctggcctataaccgtacccgtggcaaaaatatggataccggcggattcctcgacagcaccaatccagacaccgtcaccagcgcattggatatcccgattgcctcgacaggcttctctgcgggttgggtcgccactatggttgaacgtaacaatatcgtgacccgcaacaccaaacagcaagccggttacggcgtcaatgatttctacattagctataaaggccgcgatcagttcaaaggggtgacgaccaccgccgtgctgggtaacgccttcgataaagagtattactcaccacaaggtattccgcaggatggccgcaacgccaaactgttcgttagctatcaatggtaattcatacccaggtatgaattaccccgtctaaattacctgagccagactcgattctggctcaggtatttctcaacaggagagaatgaatgtcagcaatactgtttacccaatatgagcaagctaaactcgacaatccaggcaaatttgcacgcgatctggcagagatccttggtatcagcgaagcggaattgacccacgctcgcgtaggccacggtgcagagcgcctgaaggtggatgctcggactctgctgaccgaactggaagcggttggcgtgaccaaatctattactcgcaataactacgcggtacacgagcaaatgggtcgttaccagaatcagagcctgaacggccacgccggtttgatcctgaatccgcgtgagctggatctgcgtctgttcctcggccaatgggataccgttttcgctctgcgtgaagcgacgaagcacggcgaacgctttagcttccagttctttgatctgcaaggtaatgcggttcataaagtgtataacactgatgagaccgacatggctgcatggcatgctttggtcgagaaatacggcaccgctaacaacccggagatcgttattcagcctaaggctgactccgctgaagtgacaccgaatgacaatcatcagcaaatcgatcaggaatggcgggcaatgaccgacattcaccagttcttccagttgctgaaacgtaacaacctgacgcgccagcaggctttccgcgccgtcggcgacgatttggcttatcaggtagataacagtgcgctggagcaaatcctgaacgcggctaaagaacaacaaaatgaaatcatgatctttgtcggcaacggcggctgcgtgcagatcttcaccggtcagattgaacgtgtcatgccacacattgagaaagaagcgcctttccaagaatggattaacgtttacaaccgtcgcttcaccctgcatttgattgccagcactattgccgaaagctgggtaacgcgaaaaccgactaaagacggtttcgttaccagtcttgaactgttcgccgcagatggcacccaaattgcgcaattatttggtcagcgcagcgaaggtcagccagagcagaaccaatggcgcgagcagattgccgcagtggcaaccaaggacatcgccgcatgaaaaactggcttctgacattaacattggcgctgccactgaccagtgtcgcggccgaccgcatcgttaccatcggtggcgatgtctctgaaattacctacgccttgggcgtaggttcaaaaatggtcgcccgcgacagtaccagcctgacccctgtagccattcgcagcctaccggacgtaggttatatgcgccaactcaatgccgaagggattctggcgatgcagccaacgctggtgcttgccagcgaactggctgaaccctctctggtgcttaaacagttgaccgacagcggcgtgaaagtggtcactattcccggtgataccacgccagaagccgtaccggaaaaaattgccctgatcgccactgcggtcaatcaggcagataaaggccagcagcttagccaaacttatctgcaaaaactggcctcggttaacactaccgccctgccggtcaaaatgctgtttgtgatgagccacggtggcgttgcgcctatggccgctggccagcagaccgctgcggacgcgatgattcgcgctgcgggtgcgcaaaatgccatgcagggttttaaccgctatcgcccgctgtcgcaggaaggcgtgatcgccagcgcaccggatttactattactgaccaccgatggcgtgaaatccctcggcggcctcgataaagtctggcggcttcccggcctgtccttaacgcctgccggtaaacacaagcgtgtgttgattctagatgatatggcgctgctgggctttggcctggaaacgcctaatgtgctgctcaagatacgcgcggcggcggagcagagtaaatgagacgatacttgccacccggttatgcgctgggcggcctgctgacgctattggttctactggctctgggttccgccaatatgggggctttaacgctgtcgtttcacacgctgtggaacagctcgctggacgacgcctcttggcagatttggctgaatattcgcttgcctcgcgtactgttggctatcgtggtgggttgtgcgctggcaacctcaggcgcagtgatgcaaggtttgttccgcaacccgctggccgatcccgggttactgggcatcagcagcggcgcggcgttgttcgtcgctatggttatcgttctgcctttcagtattcccagcgtactggctttttacgggcatattatcgccgcgtttatcggcagtgtgctaatttcgctgctgattttctccctcagccgctttggccacggcaatctgtcccgattgctgttggccggtatcgccattaacgcgttgtgcatggcggcaattggggttctcagctatctcagcagcgatcaacagttgcgtcaatttaccctatggatgatgggcagcctgagtcaggttcaatggccaaccttgctgatcgccgcttcgttagtgctgccagcctgcgctgccacgctattccaggcgcgcaaactcaatttgctgcaattaggtgacgaagaggcgcattatcttggcgttaacgttaatcgcactaagctattgctgttactcctcagcgcattactggtaggcgccgccgtggctttgagcggcgtaattggctttatcggtctggtgatccctcatctgattcggatgcgtttaggtgccgatcatcgctggctgcttcccggtgcggccttgggcggagcctgtctgctgctgaccgccgatactatcgcccgcactctggttgcgcctgcggaaatgccggtagggttgattaccagcctgatcggcggcccttacttcttgtggctggtattacgtcaaccggagcgcgcccgtggataattcagcgtactcatctcattcgaatcaaccgctattactggatgcgcaaagtctgtgtttctctttaggtggacgtcagctcattcaagacgtgtcattacagattcgcagcggcgaaatggtcgccattatcggccctaacggggcgggcaagtccacgctgatgcgattgctcaccggctatttacccgccagcagcggcgattgccatatgttaggcaaatcgctggccagttggccacagcagcaattggctaaaacccgggcagtgatgcgccaatacagcgacctgaaattcccgtttagcgtagaagaagtggtgacgatggggcggacgccccacggaaaactacaggagcacgaggcagtacaacaggttatggaacaaaccggctgtaccagcctggctaaacgcgattatcgccagctttccggcggtgaacagcagcgcgttcagctagcgcgcgtgctggcccagctctggcaacgcgcgccatcaccccgctgtttgttcctcgatgaacctacctcggcgctggatttacaccaccagcaacacagtttgcgtttgttgcggcagctcacgcaggaacaaccgttgtcggtatgttgtgtcctgcatgatctcaatttggctgcgctgtatgccgatcgaattttgctgctgcatcaaggccgattggtcgccgcaggtacgccgcaggacgtcctgcatactgacatactaacccgttggtatcaggcggatttaggcgtgtacagtcatcctgaaaatcagttgccacaggtttatttgcgacagtaatccccttcccgttatctaacctgcgcatatgattttcagaaactcatactgcgcaggttagcttagatattcgcaagccaacaccattccccgtatgtgttcagatgatttttaccacacgtttaaggggtaacgaattaaaacttaacggttaaaaccaaacgggtaacggtgtaaccgccgcgttgcagataaacaggcataaaaaaacggaggctaagcgctgccactttgtcctccgttcgactctcaaccggccatatttgaaatatccatattcgcggttcttctagctggagcaggatatctccagatgctttccccaatctggcggcaaagcggccagatcgtcatattcggcattatcagcaaatggccgttgcaacgccaaatgcagcctgtgcaacgcgctgatatcgtcattttctgccagctcaatcgcttgctgagccagataattacgtaagatcagcttaggattcactgacttcatcgcctgctgccgttgagcgtcatcaatagtttcttgctgtagccgcgtccgatattgcgaataccatttatcaaaggcatcccgatcgacaaagtcatcccgcagtggcgaatgagcggaagattgctccgtttcactgaggcgacggaacgtacgggtgtaatcctgtttttctttcatcatcagactcaataaaccagtcaacaaatcgttatcctgtttatcggtagtgaaaaaacccagtttggcgcgcatttgctgcccgtaggccgccatcaacgccggttcgtaggcatccaacgcctgctgtagctcttccgccatcagtaatccggatagagactgccccaaacgatgtaaattccagtaggccaccgccggttggttatcaaaagcatagcgtccctgatggtcggtatgattacaaatatagtccggctggtaatcatccagaaaaccgaacgggccataatccatggtgataccaagaattgacatattgtcggtattcattacaccgtgagcaaaacctaccgtttgccaggacgcaatcattctcgccgtgcgctctaccacgtcggtgaaccaagccagataaggcctggcttcgtcagctaaattcggccaatggcgggcaatgacgtaatcagccaattgtttaacctgtactggctgctggcgataatagaaatgttcgaaatgaccgaaacgaacatgactttccgccactcgcaacaacatcgcaccgcgctcaggctgctcacggaataccggattctcgctggtcacaatggttagtgcacgactgctggcaatccctaaatgatgcagcgcttcagaggccagaaactcacgcactaccgagcgcaacaccgcccgcccatctcccatgcgcgaataaggcgtcagccccgcgcctttcaggtgccaatccagctgacgaccatcgctcagttgctgttcaccgagcaaaatcccccgaccatcacccagttgtcccgcccatacgccgaactgatgaccgctatatacctgagccagcggatccattcccggcagcaattgttccccggcccaaaccttggctttatcaccggagaaccaactgtcatccagctcaagttctgctgccagcgatgcgctgtgatacagcaaacgcgcgccttttaacggtgttggccgcaaacgggtataaaatccgggcaacgcccggccatagctgttatcaaaatccggcattacatcagttcctcaaccagccaacggcgtagttcaactaattcagcctgtgaatcagggaaatcagcgatcagcgtctgacatagggcgtccaccgcttcaggacgataagctacacccggtaaccgttcggccaatgtttccagcggggttggattcaggctatcggtaaatacttggctgcgttcgatagaacctcgcaatacatctaaatgcacttcaacaccgccccactgaaaacgagtgtccatttgatgattaaaggctggcgcctggccaaaattccattcccagctactttggcgggcaaactgctcgctaaagccgggtaaatccggcaaggctagtggagaaataatttctgcctgcgcccgttcgtcgtagtaatcaaagtaggattgctctatggctctgcaaatctgctcatgatcgatacccggtatcagctcgaccagattggcgacccgcgaccgaaccgaagcaatgcctttcgcctgtagtttcttaggatcgggattaagataatcaaccagacgccctaaattggcgtttatcaataaggtaccatgatggaagccgcgatctttggtttcccgataagcagagccagaaactttacgctcgccaccttccgtgacaacgaccagatcattacgaccagaagccgtggcgtcgatccccaatgtcttgagggcattaagaataatttgagtggaaaccgttttatcgtattcaggtttgcctgccataaaggtaaagcaggtgttgcccaaatcgtggaataccgccccaccgccgctgctgcgacgcgccagtttaataccgtcttcagccatacgccgcgtattacactctttccacggattctgagcgcgaccaatgacaatggtattatcgtttcgccagagaaaaagtacccgctgatccggcgacatttggcggaaaatacagtcctctacagccagattaaaccaaggatcataggaatcagaaatgaataaacgaagggatggcataaagggctccgcaccaaaataaacagccgttaagataacacagttgcggctgtttatcggcggttagatgcggcgcgcctgccagtaaacgcgtttccagtacacgttttctaacgaagaacggatgacgcctttactggtggatgcgtgaatgaattcatcattagtatcgtaaataccaacgtgcaatccattccctccactgcccgttttgaagaacactaaatctcccggcatcagctcatcgcgagagactttggtacccagactggtttgtgcttcagtggttcggggcaactgcatatcaaaacgatcgcggaaagtgcgatagacaaagccggagcaatcgacgccgcgctggtccattccgccatattggtaaggcgtaccctgccattgacgcaattgctcttttaactgtgcgaccaccacaatcgggtcagataggtgtccgctgggtgccggagctctgctactacacccggcaagaataagacaggccagaaaaatccaaaaacgcatccgcatagatctctcaccgaataataagcccggttggctttccttgagcggaaaccataagaaaaccaagctatcatgctgaattcatctggctaatctatatttcgtgcgcgcaaaaaacaagttatctgaataagataatagtgctaaagctatttaatcggcttcgaatgtattaaccaaacgccaaacaggataatggcggctcccagggtctttaataacgtggcgctttcgtggaaccaaggcaaagtcaccgccgccagataaaccagcgcataactaatacttaagagtggataagcctgatttaatggcaaataacgcaaagcgaagaaccagcacagcatcgaaagcgcatagccgaataaacccgcagtgacggcggcaagtggcgacagatgatcggtgaagaattgcagatccatgccagcccagctaatcagcggtaagtgaatcacaccccatttcagtaatagctgcgccaacgtcaccaacagcacgctacctattccccaaccgtaacctttcatcgcggcaaactcatcagcaaaatacccaacataatggcgacaatacctagccaatggcgcaagccaacggcttcaccgaagaaaaagcgtgatgccagcgtaaccaagacaaaattaaaactgagcatagggtaagcgatgcttaaaggcaggtgttgcagcagccgaagccacagcaacatccccaatccgagcaacagcaccgccgtagctagccacctaaaggtgtgagtacgacggctcggttgttctgtagcccaaatctgagccgcctgcttttgacatagctgtccggcgcaggtcagcagactcaccatcaataacagcaggtaactcatcatggaatttgcttataccacagcaacgccattctgctgttttgcgtaacctgatccgccgcaggcaggctttctggcaaggtttcacctcgggataactgtaagaccagcgaaacattcccctgtttacgcgccttagccagccattgagggaaatcttcaaaactgacgtaacgatccgccgcatccggataggctaaaccataattcacttcgcctttttcgctaaacataatgatatcactacgtttcaactcccaggccagacccgaagccacgccgacgccatccgagagtacgtagcggctttgttcaagctccgcgcggttctgctggataaaatactgaggcagcttggagttaatcacctgttgcggaatgacatacgccaccagcaacgcaaacagcagcgggcaaacggccgcccagcgccaatggcgagcattttgtcgcaggctgaaatagccaacgcatccccatgcagcaaatgacagagtcccgagaatcactttgattttctcatcggcggcgtacaccaccaggtgagaaaatacgcccaaaccgatcaacagtacggccaacgcgcagacggtgccgaaaatcagattgatatagccgtttaccttcagcgcgctcatctgcaatttagccacacaatcctgcgcgtacgctgccataagcaatgatatcggcgcaatacacggcagaatataggttggcaattttcctttggcgatgctgaaaaatataaacggcatcactgcccagctcagcaggaagaagagttccggtcgagccactcgctcacgccagcctttgagtaatgcccccggcaacagtcctaaccaaggtaatacgcccagacaaatcagcggtaggtaataccagaatggcgctttatgctgcgcgtctttctcggcaaagcgctgaatatgctccacccagaagaaataatgccagaaatcaggttcacgctgcgcaatcgctaacgcccaaggcaggctcagcaaacaggcactgacgatagctatcgggccaaacaacagtagctctttggttcgacgttgttgaattacaatgggaataaccgcaatcaccggaacggccaatgccaaaaagcccttggtcataaagcccatggcacaaaccagccccaaaaatgcataggcggtcattttctgtcgggaagttttggctctcagcgtcagataaaaacacagcatcgatgctgtcagccacagcgtaatcataggatcgagaacgctataagtcccgatactgaataccagcagcgaagagatataaatcaggctagccagcagcgcggtattacgattacgccacattaatgtcgctagccaaaataccaaaatggcgctgagtccaatactgaatactgaaccaaaacgcaccgcaaagttattatcaccgaagatccactggctgatattattaaaccaatatccggcaataggcttttcaaaataacgaatacccaataaatgcggcacgacccaatcaccctgctgtagcatttctcggctaatttccgcataacgggtttcatccggttgccacagtaaacggccgttcaagggcacgatatataacacagcaaaaaataccgccagtagcgctacgccacccttttttaacgcgtcgctcatgaatttgtcacctcagactgacagcctaaccacccctctctgcctgggaaagcagaacgcacgaccttgcctagcggcaagtttgaacgattttccggtaacaatgagcttaaagcgcaaaattcaattccctgcttctgcgctttcactaatagattttcaaacatcgctgcctgtgacatcccttcaacttcggcgtgaatggtataaaccggcactccgctatctcgcagaatggcatccagaataaaatcgttaaaatcctgcggacgaacttcactgccgacgacttcatcgtaagtcggtaatgtcacggggatttgtacgctgccttcactgccatcaggcaatattggccggaaaggacgcgtgccgcggcaatcgctgttatagctgaagttaaacggctgtttcgcttctaatactcgctcgtcggcgcgccacccggcgaccgcagagcaactaaccggcccgtggatactgtcttgcaatgcatccacaccacgctgaatctgatctttgagctgtgctttcgaccaggtgccgactttcgcctgccagccctgatgatcccaagcgtgcaagccaacttcatgaccggcagcctgcgtttctttcatcacgtcgcctaaatgtttggcaattaacttgcccggccaggcggtaccggccagcagaatctgccagccgtacagcgaagctgcgtttgagcgcaacattttccataagaaacggggacgtagcaggcgccataaatggcgccccatgttgtccggcccaacgctaaaaaagaaactggcctgaataccgtgtttatctaacacattcaacagtgaaggcaccccatcgcgggtgccacggtaagtatcgacgtcaatcctcaggcccactcgtttcatttagccttcccatcatcctgttcaatggatttatcgtccagcgcgctgcgcaggaagaagtccaacgtttcggcgacagtttgctgcatggcgatttcaggctgccagttcagcaaacggcgggcgttttcaatgctcggcgtacgatgttcaacgtcctgataccctttgccatagtaagcgctgctttcgatggttttcatgccagcaaacggcgggaatttgtcgcgcaattcatgtttctcaaagctggccaacagcatttcagccagttcacgaatgctggcttcgttagtcgggttaccgatattgataatctgaccgtcgcaacgtccttcgcggttttcaatgatgcggaataaagcttcaataccgtcgttaatatcagtaaaggtacgtttttgttccccaccgtcaaccagtttgatcggcgaaccttccaccagattcaatatcaactgagtaatggcacgggaactaccgatacgagcagcatccagattatccaaacgcggccccatccagttaaacggacggaataaggtaaatttcagaccttctttttcgccgtatgcccaaataactcgatccaataattgcttggagacagaataaatccagcgctgtttattaatcggcccgacaatcagacgagaatggtcttcatcaaactctttgtcatcgcacataccgtaaacttcagaggtcgacggaaaaacaatacgtttgttgtacttcacgcagtcacgcacgattttgaggttctcttcaaaatccagttcaaagactttcagcggattacgggtatattcaatcggcgtggcaatagcgaccagcggtaatatcacatcgcacttcttaatatgatattcaatccattccgagtgaatactgatatcaccttcaacaaaatggaagcgtggattatccataaagcgacccagcgcatcggaaccgatatccagtccgtaaacttcgtagccgtcatcacgtaataaacgttcagtcagatggttaccgataaatccattgacgcccaaaatcaggactcgggtgcgtcttttctttttatttagcggtttaacccctaaacggacatcggctaccatccccatttccaatgccagacggctgccctgcacgtacagtccggattcgccctgaccggcgatgatttcaagcgcgccctcaccgcaggctaccaccaatggattggtgccaagtacggttcctggcaatttttggtgctcgatgtccagtggcctggcacgccatacaatcaacttgcgctgtcccaaatggctgaatgcgcctgggtaaggttctgtcaccgcgcgtaccagattatgtaattcgcgagcggatttaacccaatcgatttcgccatcggcggcggtacggcgaccaaaatagctggcgtccgcttcattctgaggcgttagtgttaacgggccacgcttcatttttggcaataaatcctgcaacagagcctgcgcggcatcgcgcatttttgcatgtaaggttaaagccgtatccgtatcgctgatagccactttacgctgacctgcgatgtcgcccgcatccgctcgcttcaccattttgtgcaaggttacgccagtttcggtttcacctttgaccaacgcccagttaatcggcgcgcgaccgcggtagcgaggtaacaatgaaccgtgcaggttaaatgcgccctgcggagccagagataaaatctcatcgctcaacaagttacgataatagaatgaaaaaatgacgtccggctgcatttcgcggatctgctcaacccataaaggatggttgacgtcttcgggggcaaacaccggcaattgtagatcggcggcaacccgcgcaacggaagagaaaaagtgattctcattcggagaatcagtatgggtaaacactgcctgaacgtcataacccgcttcaaccagtgcattaacgcccacgcagccaatatcgtgataggcaaatacaatcgctttcatcattcttcttcctgagtttttttggcctgctgagactcgaccactttttgcacaaaatatcggggacgcgcgcgtacgtcgttgtaaattcgtccgatgtattcaccgagtaaacccataccaacgaattgtgccccaataaacataaataacaccgcgaacagcgtgaacacgccgccgccagcccattccgggccaaaaatcaaacgtaatgccaccagcagtaccgagagggtgaaacctgacagtgcaatgacgctgccaaccagactgagcaaacgcaacggcgtagttgtcaggcaggtgatcaggtcgtacatcaggttaatcagcttcatcagactgtatttggagtcgccaaactcgcgctcggcgtgatgaaccttaatttctgtggtttttctggcaaaggtgttggcgagtatcggaataaaagtactgcgctcgtgacagtgtaacatcgcgtcaacgatatgccgacggtaggcacgtagcatacagccgtagtcccccatcgatttccctgtcgctttttggatcatcatgttgatcatcttggaggccgttttacggaacatagaatcctgacggttggcacgcactgtaccgaccacgtcataaccctcttcggcaacgctcactaaacggggaatttcttccggcgggttttgcaaatccgcatctaacgtaataaccagatcgccactgacctgattaaaacccgccataatggcagagtgctggccataattacggtttagcaagacggcaataatgcagctatccggtttttctgccgcagcggttagcatttctgccgaattatcgctgctgccgtcatccaccaaaataatttcataaggctggcgtaataactggcaggcagccgaggttctctccaataatgcgggtaaactttcctgttcgttataaacaggaataacaatcgagactttattaatttcttcaggctgtgacacggcgaggccctataatagttgctaatgcgttgaccacccggtcaacatcgctatcttgcatatcggggaacagaggcaaagtacaaagccgggctgaattccactcggtatttggcaaagttaaatcgggataacgttcgcgataatatttttgcgtatgagccgcacggaaatgcaaaccagagccaatgcccaaggcttttaattcagccataagttgatctcggcttataccgcactgctcggaatctacccgaaccataaataggtgccaggcgtgatgatgaggataatcaggcaatgccaaaggttgtaacggtgaacctgccaatgcctgaatataacgttcagccaaagcctgacggcgagcgtttatttccggtagccgtttcagttgcaccacagcaatagccgcgtgaatatcggataaattatatttatatcccggttcgaccacttctgcctgcgggctacgcccttttaactcacggtcaaaagcatcaacgcctaatccatgaaattttaagcgacgtactttttcagccagcacgtcatcatcggttgcgattaatccgccctcggcgcaggtcatattcttaatcgcatggaaagagaaaatcgccgttccttgctgccctatccattcatcgccgtagcgtgttcctgccgcatgcgccgcatcttcaatcagcggaatctgatgctgacgggcaacttgcctaatgctgtttaaatcacagggcgcgccagcataatgcaccggaataatcgccttggttttaggggtgatagcagcggcaatactttcagcgctagccatcagcgtgttccagtcaacatcgaccatcaccggaacggcacccaataactcaatcatattaagggtagaaacccaggtttgagaaggcgttatcacctcatcgcccggcccaacgcccagtgccattaaagtaatatgcattcccgccgtggcagaacagaccgctacggcatgtttgcagccaaaagcctggcaaaactcgcgttctaattgttgattcttcggtccggtggtaatccaccctgatgtcagaacttctgtaacagcagcaatttcttcactgccaatagcaggaacagagaaaggtaagaaattttccatgaatgtacccagtaggacacaacaaatttaacgccactataagtcgaagtaagttaacgaaaactaaacgcggccacgattgatctcactgcacaccactgataaatgtagacaatgaaccttaatccaaccttaagaacaggagaaaaaaacattattttgtggcgtgtgcacaaaatttagccagagttggcttaatgtaaatattctgatgaatcaagagaataaacttcattttttttgcgacacaacagcagacgaaggtgaatgtttaccgatttacgctcagtttcagtatagaaataaccgaaactcagaaataatcataatcgtataatttataaaaatagtttagctaaaataattaatttttgagtgacgtgcagggttaatcgaatgatcctatctccgtcattcattgcagtatcgcgttatttagagataagaagtaaagatggcgtgaattaagggacagaaaatagagaaaaagtctgttcaacatcggattaacgcaaaatgtataggagcagcaatggcacttctcccccatcatctgccaataacgatccgtttgaatgcgttttcactacaaatcaaaatatcaatgaacagccagaattaacgctggctgttcctatttcacttgaaatttcatgttacttactacatatgactaattttacaaaggtagacgtgcctctgtatgttaagtgataagctgactttttaaacgatgcccgttactgattttatcaaaaacgcccccaatctcgtactcgttatgggataaattcttcgcctgacgaatcacgtcgttataagttatcttcgttcctttgatattaactccatactcggttttttgagcttcaactaaaaatcttttaacctgatgtggatgtaaataggcagagaagcgaccaaatgttacacactggccttttttatccataccaaacacacgatttttttcgcttgcaagacccaatccaatatttaaataatcagtatttccaattagtttacccaccataccagcctcctcataacaacatgaaaaaaaagatatttacagaggaaaatcaagacctattcgttcaatacacgcatctgaaataaaccgttccattatggataacaaacttggtatatccattccatatagcgggagacgtagccaacagatcacatcatttttttcatcaaaggcaaaaaccggctgccataaataatctgttggcctatttttattcaacagagcaatcatttcctctaacgataaactgttcgccatacctactgaggtctgaagtatccaatattcttgatctatcgcgcatagattcaattgcaaagcatcatcgattgtcaacgtaatgatatcttgattttcagctatctcgggagcttcaaatcctatagcaaccaacaattcataagtaataagatgaaattgccttaaatggctcaccggtagcagccctcttgagaaaatttgacggagtgaccccttactaagcaataattgcattaaacatagaatccaatctataaaatatcggtactaccattgagttattatagtgaattaagtggaaaaattgagttaacctcgcctaataatggctaggttaacttcatttatatacgatataaaaattagggagtaattaataaccagaatagttaatgcaataattattaattctgacaaacaatccaattctgctgattaaaacggtgtaattgaaaattcacctcaaaaatcggtgataatatctctggtcgcatcacttccagcgtttcaccctgcgcaaccagttttccctgcgccagtagccagattctgtcggcctgttgcaggctatgattcagatcgtgagcgctgacaataacactgcgaccgctggcgcaaaactcccgtaacagcgcatctaacgcaactttttgcgccacatcaaggctattggttggctcatccagtagtaataattggctatgatgattcaccgttggccatacctgtaacaaaatagccgccagcctgacccgctgccattctccgccggaaagttgagtgagagaacgcggcagcttatcggctaaacgtaatttttcacagagataaccgatggctatcgccacggattccgaatccgcccctacgggctgatgcagagagaggtattgaaatactggcatcaggctaaccgacgtttgctgctgactgagataagcccgataccgtgctaattcagcgccggaatactgcgtaagaggcgttgcgagcagagaaatatcccccgtagtcggtaatacacccgcggcgcaggctagcaaggtgctcttccccgcaccgttcggtccaataagatgaatttgcaacccagcatcaacctgcgctgaaaacgaggctaatcggcccgcgacactgacatcgttgagttgcaataacgtcacaataatctcgttagctaataagttaagtgaaaatcagtgctgagccagcgcctgaacgatcgcggcaatgattgccggatcttctggcgtcatatccggtgagaaacgctgaataaccgtaccgtcccggccaatcaaaaatttttcgaagttccacaatatatcgccgatctgttttggtgctcgccccttactgctcatccgctggaaaaactcgctgtccgcaggcgtcaaagcctgtggcttagcggaaattaagtgttgatacaacggatgacggcctgagccattaacttcgactttactgaacatggggaattctacgccaaaggtgccccggcaaaatgcctgaatctcttcatcgctgcctggctcctgaccggcaaactcattgctcggaaatcctaaaacttcaaaaccttgttgatgataggttttgtacagtttttccagacctgcgtattgtttggtcagtccgcactcggaggcaacgttcaccaccagcagcacggagccttgataggccttcagcgacgtcgtttgatgatcgatagtgtgtagttgagtagcataaatcggagcggtcatcggatgtcatccttattatagagagtgaaacttttattatagagagctaaacttttaccgagttaaccctgagcgatattgatgcaaagtcctcttaaagcgactattagcaggttttccgttcacgactctacgcttttcaccctaatcagtaaccagataaatagcggagctcccagcgttgccgtcaccacgccaatcggcaattctgcggaaaacaaggcaacacgagcaatcacatcggctaacagtagcactcccgccccggccaaagcgcagcctgttaacaggaatcgctgatcggtcagcccggttaatcgcaaaatatgtgggattaccagaccgacaaagccaatcacaccggctaatgcaacgctgatgcctaccagcagaccaatagccaaaaccaatagattacgccacctatggagtgagaccccaagctgtcgcgcctgctgctctcccagcgccatatagttcaggattctaccttgcaggcaaagccaaatcaccactggcaataacagcaacaccagcaaccactgccgccaatctatcccgctaaaaccgcccatcatccaatacatcagctgacgtagatccagactggtactgaaataaaccgcccacgtcatcacagcactgcatacaatccccaaagctacgccaaccagcagcaatctggcattgcttaaacgtcggcgtcgggcaaaagccagcagcagcgaggtcatgaccaacgcgccgataattgcactcagactcagcacccacaccggcagcaatccgtgccctaataaaaccgccagcaccagcgtaacgccagctccgttcgccacgcctaacaatcccggctcggccagtggattttcgaacaggctttgcattatggctcccgctaccgccagactggcaccaaccatcattacggctaatgctctaggtaaacgcagttgccatacaaataattgtccatcggcgcttagccaccgattgggccatatccaaacctcccctgcgcaaagagcaagtgacagagccagtaacataccgcaggcgaggagtccgagataacgacgatcccgccgcagctgatgctgctggagtaagataaatgtctgacttatctgcataatattctgcaatccggctgacagaacatgactgggaaaacaggatcatgatccgagatagaaaaaggcttattgcctgggtttgaggacagatattagggggttagcaggataagtgaaagttttgcgtagcaagggcaaggattttattcgtaaatacattaattggcatcttcctatatgagagacacggcagcaaagcgtagaaactcattagcgagttcggcgagaataaaacgaacgcggaagacggggcggaagcagagaaaatcgcgtttctggctatgctagctataagattacaaaagaaaaaggccgcttgcgcggccttttttgtcggattactcactctttgggagtggcattctctacccggctttttagcttctgcccaggacggaaagtcaccacacggcgcgccgtaataggaatgtcctcaccggtcttcggattacggcccggacgttggtttttgtctcgcagatcaaaattgccaaagccagacaatttgacctgttcgccattctccagagcacgacgtacctcttcaaagaataactctaccaggtctttggcatcccgtttgctaagcccaagcttttcaaacagatgttctgacatttcagctttagtaagcgccataggttcaatccctcaaggatgcttggaatcgctgttttaacgcctctacacattttgcaacggtagcggcgatctcctcttcttccagtgtacgggcggtatcctgcaacaccagactgatagcgaggcttttataaccctcggctacgcccttgccacggtacacatcaaacaagtttacgccaactacctgatttgcgccaactttcttacactcggccaaaatatcttctgcgggaacgttttcagccaccacaacagcgatatctcgacggtttgccgggaagcgcgaaatctcgctggcctgaggcacggcgcggtctgcgaccttattccacaacaattcgaacaccacagttcggccgttcagatcgagcttacgctccagttcaggatgaactacaccaatgaaaccaatgtgttctcccgctaaataaattgcggcactttgacccggatgcagtgcggaatgcgattctgcacggaactgaacgtcagataatttgccggtaagttcaagaattgcttccaaatcacccttcaaatcatagaagtccaccggctgacgcgccaaatcccaatgctcatcataacggttaccggcaatcacacccgctagcattacgtcctgtcgaatacccaaatctgctttattatcaggaacaaagcgtaagccactctcaaacaaacgcagacgagattgctgacgattctggttataaaccactgctgctagcagaccagtcagcaaagacaagcgcattgctgacatatccacggaaatgggacttggcaaaatcagaggctcttgacccggatgcaataaagcctggatttttggatcaacaaaactgtaagtaattgcttcctgatagccgcgatcgaccaataatgccttcacacgcttcaatggcaggtcagcttcgcgatgtttggtcatcaccaaatctgcttttaccggcacatcagggatattgttgtaaccgtaaatacgggcaacttcttccaccaggtcttcttcgatttccatatcgaaacgccagctcggcgcaactgcctgccagttatcacactgcacagtcacctggcaacccaaacgacgcaggatatcggtaacctgttcacttggcacatggtggccaatcaggcgatccagtttttcacgacgcagagtaatagtggcgcgtttcggcaaatccgcttctgaagtgacatcaataatcgggccagcttcaccgccgcaaatatcaatcagcaaacgggttgctcgttccatcgccttatgttgcaacgcagggtcgacaccacgctcataacgatgtgaagcatcagtatgcaaaccttgacggcgcgctcgcccggtgatcgacaacggattgaagaaagcacattccagcaagacgttctgggttgcttcattcacgcctgaatgttcaccaccaaaaataccggccatagctagcgctttctgcttatcggcgataaccagcgtatctgcgctcagtttggctttagtaccgtccagcagcgtcagctcttccgcttctgcggccatacgaacaatgatttcaccgtcgatacgatccacgtcaaacgcatgcatcggctggcccagttctaacaatacgtagttagttacatcaacaaccggatcgatagagcggataccacaacgacgcagtttttcacgcatccacagcggcgtagcggccttaacgttaatccccttcactacgcgtcccagataacgtggacacgcctgcggcgcatcaacgcgaattgggaaggtatcgctgagggttgcagcaaccgggctcatatccggttcggtcagagctaactgattcactaccgcgacatcgcgagcgacacctagaatacacagacagtcggcacgatttggcgtcacgctgatttcgatagttttatcatttagttgcagatattcgcggatgtcggtgccaattggcgcatccagcggcaactcgataattccgtcgtgatcgtcagaaatacccagttcagagaatgagcacagcatcccttccgaaggttcaccacgcagtttcgcagccttaatcttgaaattacccggtaaaaccgcgcccacggtcgctacggcaaccttcagcccttgacgacagttaggtgcaccgcagacgatatctagcagacgatcgccgccgacattgattttcgttactcgcagtttgtctgcgttgggatgctgcccgcactccacaacttcaccaacgaccacgccgtggaatgcaccagcaacgtcatcaacgccgtcaacttccagtccggccatggtgatttggtgggctaattcgtcactgccaatggttgggtttacccattcgcgtaaccaaagttcactgaatttcatgagatatacccgccttacttaaactgtttgaggaaacgcagatcgttttcgaagaatgcacgcaggtcggtcacgccgtaacgcagcatggttaaacgctccatgcccatcccgaatgcaaagccggagtagatctctggatcaataccgacgttacgcaatacgttagggtgaaccataccgcagcctaatacttccagccatttaccgtttttacccatcacatccacttcggcagaaggttcggtgaacgggaaataggaaggacggaagcggatctgtagatcttcctcaaagaagttttgcaggaaatcatgcaaagtacctttcagattggtaaagctgatatcgcggtcgacaatcaaaccttccatctgatggaacataggagtgtgcgtttggtcgtagtcattacgataaacccggccaggaacaataatacggattggcggctgctggccctgcatggtacgaatctgcacacctgaagtctgggtacgcaacaaacgcgttgcatcgaaccagaaggtatcatgatcggcacgcgccggatgatgagccggaatattcagcgcatcaaaattatgatagtcatcttcgatttccgggcctgacgccacggagaagcccagctcaccaaagaaggtttcgatgcgatcgatggtacgggtaaccggatgcaggcccccgttttccattcggcggccaggcagcgagacatcgatagtttcttgagccaaccgcgcgttcagaaccgctgattccagcagttccttgcgcgcattcaacgcttcctgaacctcttgttttgcctgattaatcacggcacctgctgctgggcgatcttcggctggcagctcacgtagcgacgtcatttggagggtcaaatggccttttttgcctagatattcgacgcgcaccaaatccaacgcggcaacatcctgggcctcttctacggctgctttagctctggcaaccagctctgcgagatgtggcattgttttcctcttcctctggccggtatggcccgcttgtagttattaaactgctatttaaaccgctggataaaactgttttgtgtaaaattcgctctattgcgccctgtcctacaacggccaagacgttatcgaacaacaagatattgatcttctggcacatattttactgcgtgctgccagaattggaaaccttggttcaataggatcaaacacatacttgagttatagaaacaaaaaagcctccacggtgggaggcttcggcgctacttttcgtttcttttcttacgcgcaagcctcctaaaatcaggtgctaaagtaaaaaaagaaacggaaaataactgattgcatcattatctagccttacgaataacaaaacgctgttgaacgataaatctgttgactgattagttatcctgacaaaatttgccaaggttacaaagatcaaaagagggagcaagctccctctttcattctgacttacgccagagctgctttcgctttttctaccagagcggcaaatgccactttgtcgaatactgcgatgtcagcaaggatcttacggtcgatttcaacagaagcctttttcagaccattgatgaaacggctgtaagacagaccgctctgacgagcagctgcgttaatacgtgcaatccacagttggcggaattgacgcttccgttgacggcggtcacggtaggcgtattggcctgccttgatcactgcctggaatgcaacacgataaacgcgcgaacgggcaccgtagtaacctttcgcctgctttaaaatctttttgtgacgtgcacgtgctaccacaccacgttttacgcgagccatgtacttctcctatcgtcttaattcaaaccaaaaatacttatgcgtacggcagacatgccacgaccagacccagatcgttcttagataccaggcctttaggacgtaaatgacgtttacgcttagtagcttttttggtcaaaatatgacgcaggttagcatgcttacgcttaaaaccaccgttggcggtctttttgaagcgcttagcggcgccgcgtactgtcttaatctttggcattgaatatatccacttcgcattgttaattacaacgagctagctaggcgaacaggatcatagcgcacaaggtgccatgaaacctgttacttgaatgccttactgtctcttcttaggtgcgagcaccatgatcatctgacggccttcgatacgagtcgggaaggactcgacaacggccagatcagaatcttcacacaggtctttacggacgcggttaagcacttccataccgatctgctggtgcgccatttcacgcccacggaaccgcagggtgattttggctttatcgccatcttccagaaagcgaatcaggttgcgtagtttgacctgatagtcgccatcatcggtaccaggacggaatttgatttccttgacctgaataactttttgcttcttcttctgttctttcgtcgatttgctcttctcgtagaggaacttgccgtaatccataatacggcaaaccggcggctcggcattcggactgatttctactaaatcaacaccagcttcctcggctttttcaagagcttcattcagactgacaatgccaatctgctcaccatcaacgcctgttaagcgaacttctgtggcgcgaatctctttgttaatgcgattaggacgcgccggttgaactcgttttccgcctttaatactttattcctccagttgatgaagactacggctgcgaatctctgttagcagcttgtctacgaccacgttgacatccacgcttcccaagtctttaccgcgacgagtacgaacggcaactttgcctgattcgatctctttatcgccgcaaaccaacatatagggaacccgacgcaacgtatgttcacgaattttaaagccaatcttctcgtttctcaagtccgctttcaccctaatccctgcatcttgcagttttttggttacttcttggacatattcagcttggctatcagtgatattcatcactacaacttgtaccggagcaatccaggtagggaagaagccggcatattcttcggttaaaataccgatgaagcgctccattgaccctaaaattgcccggtgaatcataaccggaacctggcgatcgttgttttcgccgatgtaagacgcacttaagcgacccggtaatgagaaatcgagctgtacggtaccacactgccacgcacgatccaaacaatcatgcagagtaaactcaatttttggcccgtagaacgccccttcacccggctgataatcaaacggaataccattttcagtcagcgcggcggccaaatcttcttcagcccgagtccagagttcgtcgctaccgatacgtttttctgggcgagtagacagtttcaccacgattttttcaaagccgaaggtgctgtacatatcgtacaccatcttaatacagctatttacttcatcgcgaacctgttcttcagtacagaaaacgtgagcatcgtcctgagtaaagccacgcacgcgcatcaggccatgcaaagcaccggacggttcgttacggtgacagctaccaaattctgccatacgcagcggcaggtcacggtaagatttcaacccttggttgaagatctgtacgtgccctgggcagttcattggcttaatgcagtactcgcggttttccgatgaagtggtaaacatatgctcagcatagttttcccagtgaccggttttttcccacagtacgcggtccatcatgaatgggcctttaacttcctgatattgatactctttgagcttcatccgcacaaaggtttccagctcgcggaagatagtccaaccgtcgttatgccagaacaccataccaggcgcttcttcctgcatgtggtagaggtcaagctgtttgccgattttacggtggtcacgcttggcggcctcctccagacgctgcaaataggcgtttagctgctttttatcaccccacgcggtgccgtagatgcgctgcaacattttatttttgctatcgccgcgccagtaggcaccggaggttttttgcaatttaaaatgatggcagaagcgcatgttcggtacatgtggaccacggcacatatcgacatattcttcatgatgatacagtccagggcgatcgtcgcggctgatattctcatcgagaatcgccactttatattcttcaccacgggctgcaaaaatatcgcgagcttcctgccagctcactttcttcttgatcacatcataatctttgtcagcgagctcatgcatccgcttttccagcagatccaggtcttcctgcgtcagggtctgttccaaatcgacgtcataatagaaaccgttgtcgatagtcggaccaatcgccattttggtgtttggccacagctgcttgatagcatgtcccaacaaatgcgcacaggaatggcggagaatttccagcccttcggcgtctttggtggtaataatggctaattgcgcatcggattcgatcagatcggtggcatccaccaactcaccgtttacacggccagcgatacaggcttttgctaacccggggccgatatccatagcgacatcaagcacagaaacagctttgtcaaaatgacgttggctgccatcaggaagggtaattacgggcattctaattccttatttacagtggtgacccacacgacagatcacatgtaatatacaattattgtttgaattcaaagagttgcattcgcaatttaacccacgcttgttaaattggtacgcaacttggtacacatatcgttttgtgtcttctaactcgccacgaaatgagtaaccatattatcactactggatacaatgataaacacgcccttacctgccgaaaccagtatggtttttataaaagcacaaactcagatttaaggctggccaaaatcgaccagcacaagccagatccaaccggcgtccctgccaataaaaaattctaatccggcattgctggccactctatgcttttaccagtcgatatatccaatctcattaaagagattcgatactccttccattttgccaaatcatttgcttccgtcccttcaggcgaaccgctgtcaaccgcatcctgacgccattcaatttcactatcagctttggcctttagcgccgatctctgactagttgcctcagctagaacttcctctggcgtcatctctggtgcatcgacccaggctggtctgccctttaccgtccccaatagttttctttgtggtgcggcagtggcgtgatatatagtcatctcatcgtcagtggggatgattaagtctgagtctttaatttcaccgtagctaccatcatcgaccatattttttgccaaaaaccggcttgtctttttattaaataaatatgacatcacaacctcgttatttagtagccaaaagcaacccagaataaatccacaaccacagtatcagccgcattaacctcaaatgttgtgctggtgacgttcctcacggtttggtttgcctgagcaccagtggcggcagcactataatttcgagtggtaatgactgaaccggtataattggggaatgcagttggaaaggtgaccgtggagaatgatgttccagtagctaggcctgttgccttgccccactggataattaacccgcccggacggtctggtatcctgatgaaactattaccagtgaagtttatttttccaaaaagaatcattagccccggcaacgtgagaaccttatctgccgtaccgacggggatttctgccgaggttgctacgtcacgtgtggatgaattacccaatcctaagttaaccctggactggggtttgtccgaaaggtcattcagattttgcgtcttttgaagggctccagtaatgcgcgtgtcattgccggcggccacggtattagccgcactccccacatctaatgttgaagaatttccgaggcctaagttattcctagcggtagccgcgttagtcacatccgacaagttttttgattgagctagcgcataggataccagccctggaagagtaacaaccttgtctgctgtgccgatcggatagtcggatacaagcgccacatcccttgtggatgagttgccaagaccaagattggtccttgatgctggcttgctcgccaagtcagaaaggttggcgcttttcttcagagcatcagcagcggcggcagcggcctctgttaagccaaggttagctacagcagcagccacagctgcaggtccagcggttgctatttctgatagattgctagccgtctttaaatatccggttgataagttaaaccagttggtaggagtggtatttgggttggatttattaccattaagcctgtttataaatatggtctcagcatcattaccaagtattaccgcaccctttggatatccaccaattccttcattaaaatcagcgtcaaatgtatttaaagctccggcactgaaccatcttaataaattcgaaagttcataaagaatttggttcatatcttggcctttaggcggtaatccgccagcagcctttaaaaccatggttattggcgggaatcccttctcgtatgacgctgaattatcaccggatggagtgtcaggaataatggcctctctctggccattaattccaaatgggactggttgtttttttggttcgtcatttctgttcatttatatttctctgaaaaatgttccgtcgttaaatggatatgcgtcagatgaaaatccgaagtatggcggaactatttgatgtgtagtaataagaaccgcgcttggtatcggtaatacctcataattctcaagaattgacacttcatatggggctaaataaaattcacaaataacccccatcctcatatctccgtaatcaacgcaaaatgccctccctctacctttaaaaagtatggaaaggaatttatttatctctttaatagtcgcaatgcttatgttcgaaaatgccttacatagaatgagtgtcctgtatgcatcatccgacagccttactgtctcagtttcctgtactccggcatagaatggctcttcattgaatggcgaagggtatgacccgccgtcattggcctcagagaacccaaaactattggtatctattgacgccttaatatatctggatacattcactatcttcccccacacatcaagaccaaaagatccgcatgtgtttacgttccacacctctttaataaactcatcggtgaattcatctaaattcacagcctgattaaatgtatcgattatggaaaggagcttttcacttgctgaatattgagttagtaccgtgtctttccagctcacattagtgttacctcaatgtctgcctgttgaattgtaggtatctgatcaatacctgccgttagtgactgggaaaaatcaacaccatttcctgaaatagatattgaggatatattcacgtaatcaggggagatagatattatcggtgcgtaatacgttcctgagttaattctcccgccaattcttgcttttgttataccgtcatacccaccattaaacacggtttccaccatagacttaatttggctgcttatgtctgatggaagattttcattagtctctatttcaaccttaaaataaattcttaacggcgtagctttttgccactgtataatgtactgcgggtagggggcgttatagttttctttatcttcgacagtgaacgttgcattaccgttaagattagctcccggatttttagtagtgaatatagcctccgcgacatcagcgtccacgccaccataaacacaggcatatactgagtgacgcaataccgggaaatttgtagccccagaattaactgttgcgtcagtccggtttgaccacacatacgcatccaaaacaccgtcagttgatagcagcgccgccagcattgcggcgtcagtgtttctgccgtttcgtgataccgattgcttccttcgcgtctcgaaagccactctcgattcaacatcaacaccgacgacaccggcggcatcatttcttactgcgtcccaaccggaaagaccggtggaataaatctggtttagttcccccaccccgcaggggatcggcccagtggtctgattctggaattggatgtcaacatgaccgctggaacctatggatgccccattaattgactgatagatatatccagactcatccatcgccgtgctacccgcagggatatgccgccccacgccaccggtgcatgtcgcagtaacaattgttccctgcgcagcgatccgctccatgaagtaaatgctgccaatgccatcctgaaatctgccagtcgcgtaatctgggttaatctgattgaacaggcacagtaatgcatcataatttgtggcgataatttctgtatctgactgagatatttggccctgtggtgaagatagcggttggctagttccgccccccatagcggcatcaaggtccgttaatctgcctgacaggacatcagcaatatcaggaaccagcaagcctgtctctgtgatagttacaccgggaaccgctgtttttaacgttgtcatagaattacctgtgattggtttccatctctatcagtcaccagtatggccccgcgcgttttacgtgtgtttttgtcgaaaaacacgttagcgatcgcttggctcacaatgggtaatttcttggcttcactttccatctttttggcgatatagccagcggaggggcgcgaacccaagacctcttctttccacggaatacccaaagtattgtcgtaataacactcaccagagaacaccaggcaggctgatgcgacatcttgagcgacggcataaccactatcagcaatggcaatgttcccattaccatctaacgttaagtcccatgtatcaggatcaagcattaaggttctgtatgtcatacctgattgtccgtagtgttggatgtgatagtggatgagccgccctgaacgttaacaacatcatgatcgtgggcgttgtatttatcacgtaactctttgagggaagcagattgagttcctgcattgtcagttatgttaccgcctgccgttatgtttccagtgacatgcatcagtggcgttgtcatttcaaccccatcaggagcagttatattcgcctttgagcaggttatgtttaccggattaggggatgtgatatttaactcactatcagcgaactcaataaactgcgttggatggccgttaaggaacccgcctaggtaaagcgcatcggatttgctgtgggttcgattacttcccggaacagactgggataaattggctcgggcaactgaattgtctctatcgcatacagcgatcatcccaatatcccctataacggggttcatgataatagctgagctgccacgctgtaggcgaaatactgggatattgtagattgtgctattgggtatcattgatcctgaacggtcagttcttgagactaacgggagaacatcaacaactaaattcggggctgtccctctcacccccttaaccttaacaatctcaataaaaaacagtccggtcattaatctttcaaaagcgtaactaaaagactctgcattacttgcttgcgcattcgttggggtaaataaattttcatgcatttttattttgtgcctccgcccttgcttcattggttctatatgcagtgcagactgaatgccacgcccctcccgaaacccaagacgatagttcatgccttacggttgaaagttggtatttaccgctggcatttgggagctctgtctccatttcgataaagcggccaataaccaatagagacgagtattgagtttgaaacataatcccgcctgatgaaaatatcggataaccaataagaccatattcctttgatattaatggaattatttcatctcgagtatttttttcaggccaaaactcaaccttttgaggtggagtcgccgacatggcaacgccataatcgacgcatatctgatgtaactgatcgaatacgctaccttcgaaataagggcttcccgatgtcgtcatgccattcattttattgaaagaggcgcgatatcccgccgcgctgcaaattgaattaataacgtcagttaatttttgagcgccatttacagagaatgggcttgctggcatgttttgcagatcagcatttgcggtagcagatatcatcaaattactatctggtgctgcattcatatttgcaactgatgaggtcattcctccagaaaacacgaccgaatcatcagcgaatatctccacgtttattctctgcgtgtctaacatattcccgtcagcgcgcccagataacgctgcaagcatatccagcccaagtccgtatattgatatatccgctgacgtccctgtccttcccactaccgcattcaatgaaacgacagcttttacattatttatggatatcttgttgtttccggatgaatcgaatgagctagtaagattggtaaagtcgaagcggagagagtgttgtttatacaatatcagcttcctccaagtagaatagttggaaccggctccccaacccctcccattgcggatcattctgtcctaccgaatccaagaacagcaggtcacctttaaacccaagatatgaataccgcaccatacggttaccgaaataacagggtacgccctgcatgatagggttgccgtccaccgtcaaatccatataaatggcactggtgcgttgtatcaggcgaatattgcattgctgtccgccaagttgcacactgaattcctgagatttcataggttcgatagatactgtcatcatggtttcgtcgcctctgcaatttccttggttaactcagccgctttctgtgttgcgctactaacaacttcaagcactggtttattcacagtatccagagcactttgaaatcctgtggtaatcgtttggtctacatttgaaacaatttccgatacggaagattttaggccgctccacgccttacttagctcatttaccgttgattgtttggctccggcaggattcaaggtggaagccccaacgccagaattacttagacttttttgatcatttgttagttttgtatttgattgcgaaccagacagagaaacctccatctgctgcatcacttcttgaaaatccagataaaccacaagcagcgtcacaccttgctgatgagtaacctcataggaatgaccgacaagatcataactctctaacgtctcttttggcgtctcaatgtcatatatccccgtcgttgctaacatgtccttgatggttttcaaggtgtcagactgactagtaaaagtaaggtcgaaaatgttggggatcgtaccggtgaaaccagtcattccggagataatgattgagcacctaaccctagaagggtctttaaccttattgatggactggtatttaccactttcaacgggagcattagttatttgggctctccctatcggctgaatagatgccattccgctaaactcaagagcaatagaagccttcccgtggtttcttattgaataggacgggtgaagcacgctgtctataattgataatggcgatccgccaccaatagcgttaaatatgtcgctggtgttgatgtctataatgctcatgggttaccaccaataaaaaacccagcgcaatggctgggtcgtggatattagaaagcaaaaacccgccggggcgggttagtttttatctacaaaatcttgagctactctagaaagataactcattatttgagtgtctctacctttctcatgagcattcggatgcattattgcaatgagcgaatatctattttcatacaactcaccctgaacatacactaaacatgcatcattggccgggtcacccttacgacatgctctatcagcttgtggtttattggatgggaactttttaggtggaaaacataaatgaatatgcattaatccagccttatatgctccgtgaggctgagtataagccacgtctcggccaaaatattcgggcactttagacgtggttttataaaccgcgaaatctcttaataaagccgactcaagtccagggaatcttccgaaaacatcatcaaagtattcattcttcgtttgagggtttatagatacttcaatgggctgcatccatttaccaccttagtgaaaacttttagaaccgagtttttcggtggtgtaatcagctaaatatctaagaccttgtaaatcaatatcactttcaaatgtaacagcatcttgtgttagttgcttaacgtagctatttaccttggttacaatagagcgggcttttgcaacttttctccaataagcattcatctcagaggagacaaatgatggcaaactactatcatcagctacttttttaagcgttatttcaaatgctctcatgaacatttcacaagcttcgaactcactaagatcttggcactttaaagcactgcgcgctttatctgttgaatcattagataactcaagcaactttaaataaaaagcattagcctgttcagttaaagactcaacaactgctttaccagcagccaattcactagcaaatttagccattaaatctagcggaacttcaatttctcctgttcgaccaacggtcggaactggagaaattgcgaacatctgcgcagacgcagcaggctgaggcatcgctgcgctcaacattgcaaatttagcgaccgagaagaaattcatatactacctctatcaaattaaactactcatgacctgtaatggtcgtttagaagtgtaattgaccgaggcgtcaacacacaaccgcagttgtttatcaaatagataaaccattggttaatcgagtgatttattttctacgcagttcacgaatttagctcgaacttacgcgatcttgcttgaaacaactggatggctgcacagttattgagccagatgatctttctgctaactactacaatctaccgcacggacgcgccagaatgcaaaaagcccacctgagtgggctatgttgcgtgttattgcgtcagctaatgggtagaattaggaaaacagcacaagggaattattatgaaaacccgattaataaccttatctttactggtgttcattttctcaggaaatgcttcagaaaataaggaagacataaaatcattagttgatgaaatgagacagtacataaccaaaggggcttcaagtccttttgatgcctgcaaaagcatagcgtcaagcatggttagcaagtatggaccacgattaagcgaattagggaaaactccatctgaagtaagagattcctcgctagcaatttgtcttgatgcgctttctcaagtagaaaccgcacaatcacaaggcgaaatatccatgtggaaaaccgcagccttgaaaaacattgatatgcagttcaaaaatgatagcagagggccagtaccaaaagagtacttgattgatagtattgacaagtcatctaagcttgctactcttttgttcctatcaatgcatgctgacgatcgccaataagcacttactttacagcgcttgaaaatgcctgatttgttgaggatcgactattcatctccttgaatccttctgccagttttgaagcctgttctgtagtcgcagttacttttacctcgccaatattttgactattgtagttgttgacaacgttttggcttggtgtgtttgctcttcccaccccattagcaagttgttgctgagtctgatagtaaccagcgtactgacttttggctgcgtttccataatctagcccattcttccaatttgaatacccttcgtgtttcgccatgtaggcactcaaactagccataacagaaggatcagaaagatctagcttatcgttagcaccgacccccatagctttcgatacctgagctatgtaggctgcagtgttgtttttgtgatcacccggtttttttggtggaggcgcccatttagtaataatcccactaatagtatctaatttatccctagtgtaataagtggatagctgatttctagccgccttccagcctgaatcttcatcagtatatttagcgaatccaccagaatccattccagcattgccttttgtcatgatatttagagggttaaggtttcgatctggcctatttttacctgatttattggttggagtgtctttatttgggtcatcgtaatcaataccgagaaatctctctagaaaatgctgctgaaagacaaatggcctctgctcatcagggacatctttatattgatcttgaaccatctgtccaagcaaggccaccgcagcaaccccaccaacacttttaccactaagtagggccatcgcagcaagaataccaagcgcattacctgcaccacctactgcttttataaacccatcaataccattaccaagccctttgaaaaacccaataatatcgcccttgttatctttcaaccactcaaggaactcctgttcagctttaagaacctctggcccaaatgttgccatcagatcttgctttacttgtgcaaattgcgagtccagagctttagtagtggcgaggatgttgcgctgggcttcttcctgttctttggtcattttccagcgtttttcctcctcagacaccatctgcacggctttgccgttcttgatgtctcccgcaaggttggggtcgtaaccaaatgcagccagagtctgcattaactgcttctcgctatgaccttttccatatttctgaaactctgccagagcgtcttcagatttaccgcccaacttatggatatcaacgccagttcttgcgccagtggtaagcaggttctgtgcttctggagtcagtccaccaaagatggttgggtcttccagattggcgagtgccatttttgcgctcatctgagaaccgagaaaagcgccaccattctgacctatgcgagaaaagccatattgagtgccaagaacattactggcactcgttcctagcattctccccatgttactggcccggacgatggattcagcggtactttcaaaagcgcgatggatgccgatggcaaccgcagtcattaccccaccaacagctagaaatcgcgttgaaagcccaagcagtccactaaaagccatgcttagccctttcacggctgctgatgctttatccgtttctttcgtcgttttggacattgaggaggtggttgatttctcaattgcggccgttaacccctcgatggcttccttaaggtctttagcccccctttcgaccttttttttacccgagagaaactcctcggttcttactgtgactttgtatgctagctcttcgagaatcaccgtagtttctccgcgtattgctgccaagctcttttgttatgacactccaccgcgataagctccagcagattaaacgcatcgcgcacagacaacttctcctgcaaatcaaggtaggtggccctgcctgagcagataatagaactcatctgtgcggatatgttgaccgaggataccaatttagatggcccctgatctggctgaatgaatggatactttacgcggctgcgatggttaaaaaatcgaagttcactccgaacaccttgtccatcagagttcgaatagttgagacctcttcaaaatcaatggacttaacctcgcgagtttgtttatttccatcgtgcgtaataacaatttgcacggtggacatcagacgatctcggagattacgtgaaacttcaggtgacgcggcacacaggacattaattccaaccgtagccagtccagcgcatcccatagcaataacatcagcaggaatgccagaaaagttagattctcccatcgaccggaaaatatcctgagctaactcgtcggcatcccacgctgacatttcagtgataaggaattccttccccttatcccgaccctcatcttcaacgatatatgtaatttgttttctggacattatgcggcgctcggtgtgcaggattcaaagtggaaaatggctgggcgtggttgcaatacccgcttacctggaggcgtaggtgtccacgtatagagcactccattcacaaagttgtacttgatgttaagcgctggaatggtcagcactgcgttgcaggcaaactttgctacagcggtgcgctcggctgcataccaatctcctatcagttgggcagcgttagacgttgccattagggtaatggtcagctccgttgggttgaagataaagccagcgtggtatttaccatctgctgacatcatatcctcagcgttctgcaatgcgccggtatcaaacatgtcttcggccgcgtaatcatcaacatcgaacccaccagggtaaaacgatggcacgatgatacgcaacttcgagttggcacttgtaatatcgataggcattttcagtccttacaggatatttgttgaggtcatgtcgatgctttgaatcaactgcccgtcgacgtaatagaagattgcaccgtcaaggctgcgctcggttcgtgatgcacctgtttgctgaggtatgaagaagaaccagccctgcgtatacagcacattggaaatatcggttccgaccgcgtcattgacgatgttgatttgcgcctgatccaacgtaacgccagcacgaatagcaccaaagttaatcgcattggtagccacatcaatcacagcagcagatatggaagcgtaaccgccggcattaaacgcatacgatgagttgttggtgaacaggttagcaaatgccgctactaggtttgcattaatccatacctggctaatgaagctatccagccagaggaacttgccggtaattgcgccatttgagacgtaattagccatggtcttgttctgcccatatgcgccgtaaaaattgtaaccgttcgactcaagcgccgctgccgtggcgttgtcagttacgtttggcgcgatacctgcgaatgcccgaaacttgtaagagactcggccattggttcggttaaaattaagcgatgcagaataagccagcgccagcaccgagtagagatacgaaccatacacagggaatacgttctcatatccattcgcaatgactacgctttgaacgaagcacgattcattattggcaaccgttgcatcttctgatgtgtcatacatcgagtaggcgtagcggttatttgacgcacttacccacgcgcacaactcttctttttgttcatcagtgagatcaaccacgctggcggtcatcacccagtcctgattctgatttacaatcgcccccattgtgtcggtgatgcttgttgctgccgcaccgggtgaagttgttgcggctgtatctgcggtcaatttcagtgcggttgcggcagcaccaggaacggcctgtgagacttcgctgttagcgccagtggtagctgaccggataatgaaccggctttgcactggcaaccagtcaacttcgacgccactaccaaacgcagtggcaattgctgctgctgcgtcagtgaagcttgttacggctgatagattaagagaagtactggttttcgatgctccatcgagcattaaagtaatcgtcccagtaactccctgtagtgcagcgattttaacgcctttaaagctaccagagagcagccagccagctacaggttcttgcaccaaccgcccaaacaaaacagcacccggtcgaacagtggcgttgtcatacccggacatatatagcgatgcagccaggtattctttgctggttgtgccaaaggctgcgccaacatctgccgcgctggtaaactcggaaactttaccaaccggcagtaactcgttatcggaaagtagtagtccgtaaacatccagcgcggttccggctgcgtttacagtggaaggcgtgatcttaaagtcacgcgataatggaattttgctcattgagtcgccttatcagcttgttcgatagaaaagttaaccgcgtcgaaatagtcctgcttgacgtcgattgtgatgtgaacctgaagtgaaacggtcagcatgtagcgctcttgccactgattttcagcattgatcatcggtgcctgaattgcttcggtgctgtatagtggggcgacccgactgtctatggccttgattgcgtcataggcatagccagtgcggaatagcgtctccaaagcgatagcccgatccccggcattgctaccgtagatatcaacctgaatttcggcctgcctaacctcagtaaagccaatggcacttgttgttggcgaaccagtatctttcttgatttctcggctggttgaatgacgcttaaatcgcaatggcgtcagaatgcaaaactgccccttatccatcggaaccctgttagcctgtgcttgttcacacttaccgatgaattgctctgcgaagtcggccagcacatcaatcacgttatcaatggtcatgtcattcatggcgtcacctgcaactgaacaagtaacctgcaccaatcaggccacagctccaatggctcaataaccagccattcttcactaccaataataaacagatcgccaccgagcactttttcacggttcaccccgtaaaaatttccatcaacatgaatcgatttgagcagtccggatatatttagcccgtccacatgcttcaagtcgccgggcgataggggctgcaactgaatggtgactggtgcttcaggtaggtacttgggaacctgcttccggccctcacccatagtgaaaccatcagaccgacgaacaagtgcagaaatgaatgggtttacgcggttaatggcaggtttaactatccgatgaaggttcaatttctcccacctcgtaattgacatctccgatcatttctttagtgtcaaccaaaggcttatcagattggttagggagcacctttctcgttttacgaatgtgaagagttacatcagaaagttttggctccatgagggtagctatcgattcctgtatgtctccttttatttgagcgcccacgacctcaagaacttgcgtggtatcaattcccgcgcgaatccccctggataccgtttcggcccaatcaccagacttttcacttatcgcgttacggaaaaatggacgaggtggctgattattgccggggtttccgtactcgttgattgccgcaaccattgccacgctcgttccgtctggataggttgccccatcaataaatccagccttcacctgtttggatgaaagctgcttttcaatgttgttcaggaaatcagatatcttcccggccataatcaactccccggatagtagttagccatgcggtataccttcgttgcctgccagtaatccattccatacgggctttgcgtgtaccacatgtaacggaattcaaccacgccagcctccgaagagaccgagacagaaccctccgaagccgacgacaaccgccctaccatgccggagccaccgttacccttgtcatccccgaatctcatgtatgccaaatgagccataagcaggtagagcaagcgctctcgcttaacggcatcatctacaagtgagaattcagagttgttaaggtaatcggtggcctgttcaaacaggtaagggagttgttcgtcggttacattggagaactcagggaacatggcgcggaatttcgtgatatctagcaccacgattgccatggattactcctctttatcttccgtcacacccgcggtttctttggaggcctgttcaaagccagttttaactttggcgttctcccgacttgcgtctttagctgacttctcatccgacaccgcgaaaataatgccgttacggatgaatttagaatcctggtgaaccttagcgaactcatcccatgcttccgcaggaacatcattggtaataccaaaaccattgaccagcgctgatgagttagcgccagccagggtaatgaccttatccccatgacggaacgaaatgccgctaggcagtttgcaaccaattacgtacatgtttgatttagaagccatcagttacacccccaacatttgagcgaatagcgtaggctgggtaattaccgcgccatacgttgtgcccgagtgtttctgcttccagcttgatgtcatagtaatcactgggtgggcgcggagtttctcgctataagcacaatatccagcatcctgaccttgggcagtttcaacgaacatttgtaccagatcgcctgcatctgtatcgtactgcggagcaatctcaatgcgcagattagtgaaggtgtctttaaccatcttctctactgtgttaccaaagatctcgttagcacgcttgaaccacacggaagcgttaggactcatagccagaaccagtggtgacgccatgtcaacgccatcacccactacacccttggtgcgagcgatcaggtcagcataaagcgccaagatatcgttatagatatcgatgacttgtttatctttccacagaaccttgccatcgacggttgctggggtgattggtgctggcaagtctgggtcattcaagatgccgtagttcagtaggccagaaacaccataaaagtagaacttattttgcgcttgattcagtgtccaagccgcagcacgctgtttctcagctacgtacggcagcatagccagaccataacgctcctgctccaactcaccatagatcaccatcgtttgatagcgatacacctgacggttttcccattgggaagtaacctggttgccgccctgctcactgtaatcatcataggccacgacatcacccgattgctcgatgcgctgaatcatcaatgtatcttgcgcccaagaacctttcttcttctcacctagaatgtctgcggccttttgcttagcaaagatagtgcggacgatctccggatcgatgaacgtagaaacaatggcaggaatgccgccgttagctggcagcgatggctgaacatcagcatccatggcaaacttggtcactgaggatggcaagtaaatgccgcgcgattcagcttccgctttaaaggcagcgaaatcagcctgagtcagttgaggcattatgctttgctccatgtagagataataagtaagtcaccgacggcggcagggcttgccacataccagtcagtttcaaccgcaccggaaaccgtcgctccagcgtcatctgttttcagtgtaccgtcagcaagaacagcaaaaactttctgtcccacggtggcaaccgtcgcagcgatcgcccagaaatcccctcccacaataggtgatgcttcacgacctgccgagatggtcatgctattactttgcaggtagccgatggtggcattggcgttgttatagatgaagccaacaggtttgccggtgccggagttatccagtcgcagagggttagtagagttacgccatgcgaaacgagccatgactaatccatcagttcccgcctgaaatgctcccggaccgcccgccgccgcgatgattggagtagttgacgcaggctgtccggcctgtccaacgccggaataaatatttacgctcttttgaaatgacatattatttcccctcgaagaagtttttcacgttagcgcgagagtcgtggctaattggcgctgcgtcgtttgccattgctgggcgagagtaggctttgaagacagattggagtgctgctgaaggcaatgttgcatgatctgcacatcccatctgcttcagcgcggtccggtaaacttcatcggcactatcgcatgctaagtcgccaaccacggggcgaacatcacgttctgcctgacgaagcgcggctgcgcgggcttcaacggctttaatcgctgaatccatagctaatttactgtcatttgccatcttctctttatcggctctatcagcctcatctttggctaacttgtctttctcagcctgctccgcttcgtctttggctaacttttctttttcttcgtcggtcatctcgtccttcgctgttttggggtctttctcgtcgtctttgatgagcttttccacgtcctcttccgctttctttacagcttcagggtcggcatcgttagccatcagcggcttgaagatgctcatgagttgtttgatttttgacatcagtttgagtcctgtaggtagtgagtcatatacaaatacatccgggccagcccggccacttggcacgattgccacatggttacaaacgatgtcacgcataacgccatcgtatggttcgccctcgtactcgcccggcgtcatgtcgagccgataacggtatgaagatgagatttctcgctgctgtttgttctctacgccgataatggaattgatgtcgtaaatgcccatcgaattcttcagatacggagcttcgtacactgcgtcagtgccagtcgaaccaataatgtgttcttttggcgggtcaattaccgacacagcgatgtgagtgtctagaactggtttgttgttgaatgttggagcggctttcctgagttcttcagggtcacgtagcaaccggtatgccttgtcagggttaaggcctaacgcttcccaatcgggtatctctttgccgtagtagacgcagacgttagccttgctgataggcgtcagttcaacatgaagcatcccgtcaacgtcatagcgacgaacgctcgccttatcgaaggcaaacttcacatctttcatgttctttcctgtttttcgggcaataaaaaaggccgcctaagcgaccttgttcgttttatattttcagaatggcaatactggcttccatacacacccgcaattaggctcttcacccggcaacacatgctgccctttgtcaccgattggcaggcccttatctaggtcgaactccttcccgttagcatgaacgtgcttcttgcggggttcgctaccgccgccactgtgtaaccagatgcctcgcttaatccctgccgcttgttgccttgcgttggatagtgcgctggtagccttgcgtacctggtcacgtgcaatgaattcagcacgcctgcgagtaataccatgacgcttgccaaagttagcttccatttcgtcagccaatcctttgcggtcgccacccttggctactgagcgaaacaccatcgattccacttcagtgaaatacttctcaggaatggagcggattaacgccacattctctgaaatgatagcctctcgcttttcgagcatagcctcagtccactgcatgttaattgtcattgagtctttacgggcagcagcaagtaatgagcggtcaacagcctcgccagtcttgtttgtcactgattcggcagtaggtagcgccatcttaatgaagcgctctacccacttcctagacagagcacgcaaagcactacgcaacaattgaaccgggttagcgtccatcgccagtgggttatcttcaaatatcgggacgatttgtttcttaacatcgtcattcatttctctgataacagccagtaactctctgcgataccaaatgatattaccggcgttatagttgaccgcccgaaggcttctactcttcttcggtttccggttcatagtcacccttcaggttttcgaatcctgcaccttcaatgcttttcagtgcgtctcgcgcctcttcagagttaatcagcatgctatcagcagcagcaaccacggtttcaacgcgagtcttgttggtgttggcacggtcatcatcgctgacctcatcaagcggtttaaactcgaagtagatgtcgggcttcagttcgccaaactctgaaagctggataatcttgaagatgttctcaatggctctgcgatagtccagttcttgcgagccggatatcgtttcgtgccacgtctcaatctcagcatccccactggcattcaaacctgctggggcgttaccaaacatcttcaggttggtggtgcgtgatggtatgcagagttgctcttggtaattcgataggatgcttgacagctcactcagtgatgtctgcatatgaatcagatcctcttcagtatcgagagcccatataccaaagttatcctgatacttggtgaacattttaatgcgcttatcaaattcaccagggatttctaacctagcatccatatccgtcttcagcgcccgcattcgaagagttcgaagaatctttatcacgttcttcttcgcatctcgccagtcaacaacgtaatcctccattaactgcgtcagcgaaagaccgccgaagttatatgatggttttagaatgtcgggcactgggcggctaacgatatcgatgaatcgagactcatgcaccgtatcccccatcacgaaccatgcttggggtttgtagaaatctggcctaagcggtttgtttgagttgtacatcgccggataaacccaattagggtctacgcaacgaaagcctttaagtgagcctttagttatcttgcgcgggtctagaaataggggtttttcgttctcaaggtcatcggcgccaacatcaataaagatgtgtgccacgccatactctgagtcctgccttacggcttcgtgaatcaagcgcttaatgtcgtatttggtcagcgccttatccattaggtcgatatcaggatcaccctctttggtgctcttcacctcaatccagtttcgcgtcatctcgtcagccatgatggtatgcatgttcgcatactcaacctgctgagacattgccgccaaaatagggtagccacgaaagccagaatattcaccaccaataaacatgccgttgatgacatcgtaaggcgtggagtccatcgctagagcggattcttctttatcttctggaatcacacctggtagcggttcgtaacgcttaaactcagcaaatggcttctcgccattcgcagcagacgccgcatcaagatgcgcatttgtaatcttcgccagttcccgccgaggtgcttgcacggcttgagctgttcgcacagccttctttcttgtcattgcagtatctcgtcaggaatgttgaatggtttgtgcgccggagcaaatgccatgattagcgagtccgccatatttggtgacggtatgccacgcttcttcatgtctttcttgctctcaaccttcacgcgaccgttattgtcgtagtcaacccatgggcgtgacagctcagccttgaggtattccagttgtttaatgccggagctaaggctgattagctgatcgtctgaaaattgtttgatgaattctttgtcgttggggttggcttcgaggtgcttaaccactcgccatgtattgaagaagcgatcacggactccccaccatgcctgagccttgatattggagaacatgtctttattggtcttgccttcagcatatttagcatctggtttgaatacggcagcacctgcgttaaatccgctggacggtatcgcacagacgcgcctcaggtgagcttttacgcctgcacccacgccaatggagtcgtaaacaatctcgcttgctgtgacgctttctgcgtagtttttgacgcgatcagatgatgtgattacatcacccttgttccactgctggcagtccatgacaacagagccgtgggccagtgttgtagcgttgctatcctcgccttcatctgctacgtcaaaaccgactcgcttacgaccagaaggggcgaagccaatcagtttatgggcatctatagcggcagcaatccacgatggcttgataattgccaagtcactgtcggcaaccggctcaccttcccaaatgtgcaggtaaaggtcgtaatcacgttctttgcattcagccatttgcgcagggagcggtgagtcatggaagtgagggttgtcgttgtaattggctttcagaacaatcgccccagcaggaggcctgacgatgaagcgctgatacgtatcgtcaagaatgttcttcgggttaaagctcacccatatctctgagtgtttgtcgcctcgtatggatggaatcagtacatcccatgagtcttttgttaccgcctcggcctcttctacccagcagattccaacgccctgtatggattttatttttgtgacgttgtttttaatgccggagaatacgaagctagcaccggttgctaggtgaatgattgtgtttttctggatttcgaattctgtggaataaccgagacgatcgatagtctcacatagcaatttgtggactgagtcgctaatagaaccctgaaactcgcgagtacacaaaattaccgtgttaatgcgtcgtgcaacctccacggcaagttccgcaaagaaatatgacttcccacttccacggccgccgtaagctattttgtatggagcgctttcggcgaatggcttgaaatgtggattagccatcgaagatgtccttaatagatttgtgctcgaccttaactccgccactcagctcgacaatcactttgtccaggccggtcaacttggccttgcccattgttgcggctacggctgctgatgattgtggcgtctcagccgctaaagctgatttccgagcctcttccaattctctaatcaaagagtcaacagtgacgtgatggcgctgcttaatctcaccctgcaattcggcaatccttgccgtgatcttgccgttgtctaatgactctttagctttccggttaatggtctcaggtttcatcttgtcagcagcatacgccgtccgatatgcctcagaagcattacccgtttcgatgtatgcctgacagaatgtctcttgcttctgtgtcaggcttgccatggttatttctcgtctgaatactgcgtgataaaggtttctctaataagttcggctctaaacttagcccccctgatggatccgggtagaatttgagtaatgtctacccctgatgcccccaaatctcttaacgcatcaagttcttcatcaagcttcccaagcagccaatcgctggccttatcttgaattatttctggaacgacgcgagcaaactcagttttatcggtcaccatcatttccttacttcaaatttgaatccgtggcctgcaataaagcgagatagcagccttgctacggcttgacggagttgacccgtctcgttgttcaacgatcgttttaaacgatcaatagccgattattgatctgtacaaccaatttccatccctctgatttgactgtcattcttttgcaaaacaaaaaggatgatgactatgtgggctaaatttaaaagttggtacatggctgcaacagtgagctactccaccctggcattggggctaacctttacagggatggcctctttggtcgggatcgcctatctgatatatgagtgcttttagttaatggagagccgttgtgaaagtggctctcagtttttcttttagctggcaatatcgagcgttaacttcagttgctcctgccagaattccacggttgcttctagggcaggtttgtcccagcgccaacgtgccatttctcgtgcaccaccacttgcttttgatttccggtcatcgcgaattcggcaggcctggtcatagttttgctgctccgttagctcaccacgcaacaagctatctatatgcaaatcacaccagacagcgaaccgagcatcgcaccaacgcgcaaaagcgaccgatagctttggatgaagccatgtaccacctccgcgatcctttctcgccttactggtttttacatacctgcatttcgagggatgtagaatttcagactccacaccagtcattgcctcatccagcgcccggatgtattcaagcgtttcagctagcctcatccagttgtcgatgcgcttaccaaatttctcagcaacgtcagtgacgtttacccaaccttcagtgttaaagcgtactgattcgcctttatagctaagagggataatgttcattcggatataccttttagtgatgaaccttgttcgcacaggaatacggccctcagaaggctccgacagccagccggttcctcaagggtcatcctgaaaggttctgagtgatttgcgctgcgatgcgctggatttactgcataaaaaaagcccgacctaagtcgagccttttgtgtttttttgcctaacaagcctacgaaacggccatttcaatcaaatctgtgaagtccaagcacatgtctagcctgtgtccgtgatcatccacgaagttatatttcttaaagtgttcgatcatctctttggcacttttgccacttaaaggagatttatcaattgattcgtcaacctgtttcatcttcaaaccttcattcagttggttacgatagtgcaagttccactttggaaattgcttttctaggaggcggtatttatcaatattcgagagtcccggcctccattcacacgtcattaatgaacgcaccgtctaaggggcagtattttgatgcgcatatcaaaaaagctggctacccttaccgcaaagttgggtgattaattcagcggggatgctgtccccaccttctcttacctcgcaagacaaacgttattgatatacgcctgcaagccgtttatttggctggttgcaattccgattcgctcgcggagactgagataatcccgttcagcggcgttagtaagtctggcgctggcatcatcaacgctgctggaggtggctgtggcttcgggcaatcgcttacagctggcgttgagctgcaaccgcttagcaccagtagcgatatcagcacgaaggcgctcgttctcagatttggcatctgccagttccttggtgtatttgatatcgatagcagcaacctgctggcgctgaattagcatcgtgtcaatggctgactgtctgctgttggctatctgggtaatgtcagagacgtcgcgctgtagcctggttacttgcccgtggtaatacatcaggccgaatagcagagccaccgttacagcgatgagtattgccgttacgcgactcatgacaggaaaagctcacgctcagccgcccggcgattagtcaggcctttcatttctttcccacctgctttattccatttcaggaattcatccgcagcgccctttgcatcacccgcgtttacctttttcatcagcgtcgatgtgctgagcgctcgggttccgatgttgtaggccagcgataccaaggcgtcgaattgattctgggttacgccgattttgagcatctggttaacgccctgctcgaactggacaactccgcatttcagcaaccggtcggcggtaggctgatcgatagtcatgccgcgaaccacgggcttaccatctactggatgagtccagccgtaaccaattgtccagggagcgccgccggtgccagggtctggatatgccgtcaatttgcagccttcgaattgttttattagattgattccggtgctactgatttgcattgtcagcccctgtcttattgccaacgatgcgctttagcaccgaaccaatgtaatccgtacccatgtacccaatgaacacgctggcaattaatgaccagtcagggttcagcccggctataaccaatacatctttgataaaccatgccatcactgagcacatggccgcatcaagcatacgttgcgttttacctcctccggcataccagccacgcaagtaagccatcaacgcagccagtgccgcgctaagtaactcaccccggtggtctgctatccaggcaatgatgagcatccatacatccggtgatttcaacattttcatgacccaccccccgtttggggaaaatcttccccggcatttggtcgggtgctgttgtgtagggaatagctcccgtcgtagtcattcgaaagtgtgagcgtgttttcagtgattgactgttttgacgggagctaaataaaaaaggcacaccgaagtgagccttaaaattggtatgtggtggcggggaattcgccgacatcgtttcactggtgttccacttgtatccccacacatcggtgcctgcattcaccacattcggctggatactgtttcacaacgattggattaaccaatccagtacccatgcgaatgtagaatgcaaaaagccccggcgattaaccgaggcttctaatttttgtggtggtgagtcagctcaagacggcattcacaagcgccgtttacttactacccctctaccaccaccgctcttcgcctttgacgtccgagcttaactgaaatatacactttcaaaacttaaaagcaatacattacgtaaatattttctatttatgcggcgattagtaggttttctttctccacttccgacctcaacaagtgaaataatgttgcgttgaatatctcacggcaccacctgatccgatcaatgcattgctttagcgtcaggtgcggggcgtgaacgcgatttaggtaacatgcgatttcttgcatgtctttgcgctcacaatagtattgaatagctacagcacgaatcggattgctttgagtaaatgctttgaggactacctgatcgacaaatgcagcttcttctccctcgttggcgcgcgcgaaaagattgctgaatgagtttctcgggttaattatctctttggccttctggaataattcggttccccggtagcccaatttgtggaggtcctccacagtcttcacaattgaggctcctttattttcatcccacgcactgacaatcattagtcggccaataacaccacaactccctgtcggcgcggtgtcaccaccgacagcctgcccccacatatttaggactgaccttacccaccgatcctgcactggagtgatgcgctgtaatttacccargtaacttctgcgtggagcttttgcaagctcgtgccatacattggatttcatgctgcctcctggagaagttttagctttttcagttccagccggtagtaatctcgaatgcttttcagctcttcaatgctgtaactgctgcgttcgtggttgttttcgatagcctccactgtctcaattccaatgcgcttaatcagctcgacgcggtacggaacgatattcccgctcttgtgctgattgcatactgaacattgtttatggatttgccgggggtcgaatctgaattgaggtgctgctgcggttgttctgtagtgccctgcgtcccactgtgctgctgaagtggtgccacatgatacgcagggtaggtttgaatctcgtgctcttacaaaggcgttgacggcttgctgcgcctgcttaatccaatacgttttggggtgggcattaattcttctgacttttagctgcttccgatcctccttttgccgctcctgcctttgcttaatctcgttatcgtagttctgctttcgcctctctttcataaccagaaccgcgtattctattttgtgctcttcgcagcaccaccactcgtatatcgcggccggtttaaatctcgttttacacactttacaatttcgactcttcgggagcttggctatcattcccggcctccttcgctgctttatcaacgcatttctgatgggcgtaggtttcacccttgttaagcatcaagaagcaatacacgcatacggattgcggtaactgagtcatgcctgctccccttgaatctggataactgttaactcacgcccaaataccgcaccagtgtcgatatagaattggtttttaaattggctgggtttactcattggcgtatggccgaagataaactgctttgccccagttatttctgcacctaaaccatccatagcgtcacccacgcgatcccgattccaaataacaagctcctcactaaccggctttccgtaataatattcattgccagggtagtcggcgtgggccactacatatttaccgctgtcagttgtcacttcgatcaccagcggcagcgcagcggcctgattaattaagctggttgccaatagtttttggtcggggtcgagacagaaaaaccacattccgccgttagctacccagcattcagccattccatattttccatccagtgcatcaatcgccatttgctcatgattgccacgaaccgcacgaaaccaaggctgcgttatcaggtcgaggcattcgacgttctgtgaacctcggtcaatcaggtcgcctacggatatcagcaagtctttgctctcatcgaaatctactgagagtaatttctcatcgagcttattcaggcagccgtggatatcaccaacgacaaatattcgtcggtaatcggccccgttaatcttttggtaaatatcaggcattctttctactcctgagtcttagccagcgtttagctaataacggatagatagcgtcatatgtgggtatttcgctggcggggattgggggtttaggtttggttcgggatgtcttgcggaagataagattgtctagggcgaaaactatgctgctttgcctttgtcgcatggtgtatttccccaccggttagcccactcgatttccagcttggatgcatcgctgaatatcacgccctgctcagtgccgaaccagtagatagcctcgataacctccaccatctcactcactcgcatcttgctagtacgctggccgaacatcaccaccccgccgccgattccaggagccgtacgctgatcctgatttttggccttagccaccatcgcagtaatcaggtctttccagtcagcttcatcgtacttctcaccgaaccagagaacctgttttgataggtcgtgcaaaagtggccacattttccgattctggtcattgctgcgtttcttctcctgaatgagaacctcaatcggctttttctcatcaagcggcacactgcggatcgctgctatggcgttgtcacgtacctgggtatttcggagtagataggtatgctttgtcatagtggcttctccggtgcggcggctagcatattggcatagcgctcttgcatactttcaaagctgcctgttaatcccaatagcgtgagcatggctaaagttgcctctttcggtaatagtttccaaccttccggaattaccggagagttcaactgtggggcgagatagacagggatatcacctgcaccgccctcaggccaaatatcagcatcagaaccggatcgaagataatccaaatggttttgctctaaataaccaacaggctcagccctctttgcagctaacgcgatgcgggctagtgctgcgatttccctgaaattaatcagattagtgactctgtttggtcgataatcgcaaaggctttctagcctctcagatgtaaatctatctaattctttcatggctttacctcaacgttaataaacccgccacagccacactttgggcagcattttcttttggtgccagaagactcatcactcatgacaaccctctctagcttcaagtggtgatatctgcatgctacgcacattacggcttccgttgttttcattcactctctcccttgattcgaatgccagcagttcggagggcgttggcggtggcactcaacccttcgttgtaggcggtatcagtgtcgaagttttcatctcgctggtctggaaactccacctcaatgctttctcgcgacgcttgccacgctgtccgcatatctaacactgacgctttagctaagttggttaactcgccatcgtcgccacactcaaatgcaaggcggtaagtttcgtgggatttcgatttaagccaagcttcaaactcttcccgcgatttagttatgtccatcatgcagccctcttcgattcgtatctggcgcaggtgatagcagtccaggcaatcagttgtgcgcgtttcatgtgaagctccttcagccggtcaagccagataaataccgggccggtgtagccgttgtgagcaaggcgaatatattgctcaatggttaattcatcttcgcgagtcagttccattagaaaccaccttgttttttagttgaccggcgctcagattcagccgcctttgctttagcctgatcctggttgcagtcatagattgcgccatgacgttgctcgacgaataccaccccgccgctgccgtgccggttaagccggagtagtaattcggtgtcctgctgattggcgttttcgtcgtaagcaccttcgcggtatattcccagccagtaatcacagtcttgctcaatctgtcctgtgtcgcgggagtcgcttggttgaggccgcttattgacgcgcctttctaaatcacggtttagctgagtcagcagaacgacaacgcaatcaagttctttggcgaggttctttagccccttggtgatcatcccgtaagccagatcattacggtctgctttttcggctgacatcagtgtgaggtagtcaactaataccatgcctacaacaccacgttcgcgcttgatgcggcggcactcagaaacgatgtgagacagtgaaagtcccggcgtatcgtcgatgtacagattgccacttctcgccagctctaaccctttcgcagacgccaacgcaaaacggttatcgtcgtacccatcaagataaaaattactgctggatactcctgaggcttgggaaatcatgccttcgcnnnnnnnnnnnnnnnnnnnnnnnnnnnnnnnnnnnnnnnnnnnnnnnnnnnnnnnnnnnnnnnnnnnnnnnnnnnnnnnnnnnnnnnnnnnnnnnnnnnnnnnnnnnnnnnnnnnnnnnnnnnnnnnnnnnnnnnnnnnnnnnnnnnnnnnnnnnnnnnnnnnnnnnnnnnnnnnnnnnnnnnnnnnnnnnnnnnnnnnnnnccggtaacaaagctgattgcatggctgttgcaatgcaagccgttcaatggggtatgaacccgtttgttgttgcccagaaaacccacgtcgtcagcggaacgctggggtatgaggcgcaactggtcaacgcggtaatttacgcaatggcacctacaaaagaccggattcattatgaatggtttggcccatgggaaaacgtgatcggcaagttcgcagaaaaagtttcaaagaacggcaataaatacatagcaccagactggactctggcagacgagaaaggcttagggattcgagtgtgggcgacgatgaagggggaggatgaaccgcgcgttcttgagcttcttctgtctcaggctcaggtgagaaactccaccctgtgggcaagcgaccctaagcaacaattggcctatctagccgttaagcgctggtctcgcctctactgccccgaggttattctcggcgtttactccactgatgaattggacggaaaaccaaagcctgagcgagatgtaaccccgcgcaccaatgccgacctgaacaagatgatcaacaccaagaaagcggagccaatcgagggcgaactggwgaykrcwrwmstnwgatgnakcgctcacctgatgccctgcttgctgacttcaccaacgcagccagcaacgcaaagtcagttgcagatctggagaaattcttcaaatacagccagcgtgtcctcgctagccaccccgaccagctggaaaaggcgatcgacatttacagcatcagaaaagctgagatggaagaatccgtggggtaacagatatatggataatccgcatggaaacatcacggtaggcgcggtgacgctaccttatccccgaatacatcatggatggattaccccgaagaaccgcattgaacggaacccatttaaagcgcaattgattgcggagcggttcaactcatgcttgaagctatcagtcgctgctaacggactggtggcttaaatcccttacccctccacttaaccggcagtcagtctgctgaggaatagttgtgtcaaaaattcgagaagccattaacaaggcactccaataccgagccactccatccgagcggcttttaatattgtcggtgatactcgctatctgttgtgcgggtattgcttatctgattattgattcgttttgaggtgatgggaatggataagcatatagaagagctaagcaagccggtggcgtggacagatgcagaagaactgcaagacatggagcggggatattctggttacttgttcaaatcaatcctgatgaccgcaacatcgacccgcacaggcaaataatgctttactcgcaagagtacgttgattcactgctagccaagctggaagcggcagagaaagaaataagtgactggcgttctgttgcaggagcagcggcacaagatgatgctgactggcacaagctggcagatactgacaatgagataatttgtaagctagcgaatgctcttattggcgcagatgaacgggccaagagagcagagaagaaactggctgaccttgaatttgctgattacaggatttggcatggcgcggcgtgccataacggcatgaaggttatatcattagagaatgaaaacgctgaattgaagcaacgcgcagaggcagcagaggcgcggctacttgtgcctgatgggtggaatgtactaggcccgacttatccagccccttacacccccgttcttgttgctatgaatggtgttgttcaacacatcacctaccaaatcgaagaaggtgataatggcgactactggcaaccagtgaacaatgaagatgatgatggtgcgccaataaatcaattccagcactggaaaccgctacctacagcaccagtctatccggttgaagggggtgagtagtgaacaagcctacgactattatcgacgtggtactgcgcaagcacatggactacttcatggagtctgaccgcatgttaacggtgtatggggcggagaagaaagcgctgaacgtaatccgtaacatggacaacgttactttgttatctgccattagttccgccgcgcatgagttgtatagccatgtggggaaaggccctttaccgaactaatccattatagccagtgaatatgatgagctattcacagcatccaagccagcggaggaataatgctaatcggctttgtcctacttgtcagttcctgcggccttgacgcctgcgaagcgctgccagtttcagacgatatctaccctacccagacagaatgccagaacgtatccgcgctgattaaagaacgccgcccggcgacagtgctgatatgtggcgaagtacgccgctaacctcttccccattttcacggatatgaagaaacggatttcactaaatctggagtatcccctatgcgaataaccattacggcgccggactccggctgcattgaatttgccacgcgtgcattaaatgcctttatcaaaggccgtggcaatggcgaattcccgcatccaagcggtgcaataagtaattcattttttggcgccgaatgcacagaaaagcccagcgggaattattcaattaagtgctggcgtataccaaccaatattgcggaggcagcataatgcccgacgatatcgataacgcttcagctctcgaacaacacaacatcgacaccgcaatagccaaccgtccaaaaccaacaatgacattcaccgggcgctgccacttttctgagtgccgcagggcaattactcgtgggttgttctgtgatgctgactgccgggatgaccatgagattgacgaacggcggaaaaggaatgcggcatgagtgactaccagcttatctattgcgacccgccgtggcagtacagcaacaaggccagcaacggggcggcaaataatcactatggaacgatgacgttagcagagctgaaacgcttgcctgtctggtcgatgtcagcaccggatgctgtgctagccatgtggtacacgggaaatttcaaccaagaggctcaggaagtcgccgaatcctggggtttccaggcgcgcacgatgaaggggttcacctgggtaaagctaaaccaactggccgaagagcacattaacaaggctctggccgccggtgaggtgcaggatttttacgatttcctcaccctactgaatgaccagtcacggatgaatggcggtaactacacgagagccaacacggaagatgtgttaatcgccgtgcgcgggcgggggctggagcggctgaacgccagtattaagcaagtagtttactcgccgcttggtcatcacagcgaaaagccgtgggaagttcgcaaccggctggaaatgctttatggggatgtgaagcgcatcgagttgttttcaaggaaggagttgcagggatgggatacctggggcaatgagtgcggccagtctattcaactgatcccggggagagctgaggccatatgagcgaactaataatttacctggattgggtgctgctctttatcggcggcatcatcacctactggtggctgttctgctggaaggagtgaatgtgtgactccacaagaaaagcaaaacgccctccagtcagtagcaaagaaatgtaacgacgaaataaataatgccctcgccgcactgccggccaacaccaataaagacctggtgacccgtccaatcatcctacgtcactatgaaaagctaaagccacttggctacaagctggcttggctgctttttgctatcggtgtgctgaatggtcagtttaagtgggagaggtgatggagtttctcaggaggtccatatgcaagaggtcgagaaatttataaagattaaagaatatgccgcgatcttaaggatttcagccggaaccatttacaaaaacccactcaaatttcacatgtttaaggttggtgatcgctggagagccaatctggacagtcttaaaaagtttgaacaacaggccgcaaatgacaacaatgtcatccggctggctgttgtaggcggtaaggagaagaagaaatgccgatctacaaaagaggtaaaatgtactggatcgatgtctcagcgccagacggaacaagaattagacgctcttctggcaccgatgaaaagtcaaaagcgcagagattgcacgacaagataaagcatgagttatgggccgtggcaaacctagataagcggcctgaaaagttatttgaggatctgatggtcctagcattgcgggatgcggaggggcaatccagcttcactaataaacagatatatgctcggtactggcttagtgtttttggtgggcggctaatctcttctatatccggagaggaaataacagataacctaccaacgcataatttgatgacaaggaagcgcctggctaacgcaaccagaaaccggtaccgatcattcattatgcgagggttctcgcttgctgataaaagtgggtggttggaccgggagccatatgttcagtctctgcgtgagccaaaggtgagaattcgctggatagagaagagcgaggcaaagtgccttattgacaacctgcgtcatgactggatgaagcatgtatgttcgtttgcattacttaccggtgcaaggcttggtgagatactttctttgaagtggagagatgttgacttagggcgtagggttgcggttgtcacagcggacaatgccaagtctggaagggcgaggccacttccgcttaacgatgatgctgtagccatcatgaggaaaataccgattgataatgaatttgtattttctgctgatggagccaaagaggggtatatcaacaggaccgactttgaccgagccatgttgttatcagggattgaagatttcaggttccatgaccttcgccatacctgggcgagttggcatgttcaaagtggaactccgatcatggtgctgaaggaattgggcggatgggagaaacttgaaatggtaaataaatacgcccacctgagcggtgaacatttaagcaaattcagtggcattgtcacgtttctggcacacgacgctggaagtggtgaaaacgccaaccgaatatcgcttgtaagttaatgaaataaaagtaaatttacgccaaccattaatcactaatcggcgatagcatcagataaacagtctgatgttgctattgcctgaccacacaaagtatgtggcctgtaaattactggttaaccgtctcttgcggtgccagtgggttacggctgataaacatcgcatcgccgtaactaaagaatcgatattgctccgccacggcctgctgataggcattcatggtgtttttatatcctgcaaatgcagaaaccagcatgatgagcgtggactctggtaaatggaagttagtaaccaacgcatccacaacctgatactgatatcctggataaataaagatacgcgtatcaccgaagaaaggagcaattaagccattctcacaggctttggctgcactttccagagaacgaaccgaagtcgttcccaccgcgaccactcttttaccccgtgctttacatgccaataccgcgtccacaacctctggcggtacttcggcatattcggaatgcataatatgttcttcgatgctttctactcgcactggctggaaggtccccgcgccaacgtgcagagtgacgaaggccatttcgatgcctttttctcgtagcgcagccagcagaggctcgtcaaaatgcagccctgctgtcggcgcagccaccgcgcccggacgctcactgtatacggtttgatacagttcgcgatcggcatcttcatcagggcgatctatataaggaggcaatggcatatggccaatcgcattcaaaatactgaaaacgtcctgttcttcatcaaaacgcaactcgaacagcgtatcgtggcgcgccagcatggtggcgcggatactttcattgtcgcccagaagcagctcagcgcccggtttcggcgcttttgacgccctaacgtgcgccagtacccgatgatcgtccaacactcgctcgaccaacacttccagcttgccgccgctggccttacgaccaaaaaggcgtgccggtatcacgcgggtattgttgaaaaccagcaggtcgcccgcttccagcttatccagcaaatcggtaaaaatgccgtgggttaactccccactcgggccatccaacgatagcaaacgacagccactacgctggggctgtggataatgagcaatcagtgactctggcagctcaaaagaaaaatcggcaacacgcatggttttccactttagacgacaaaaacaggccgcctagtctagagccgccaagggttggctgcaagaattaagcaagataacctgctatttggattatactctgcggatgaattttctagctcaccttcatttagccagtttgtccgacagctcgctactgggcaatctgatggccgacttcgttcgcggcaatccgcagcatgattatagccaagaggttgtggctggcatcatgatgcatcgccgtgtcgatgtgatgactgacacgctaccgcaggttaagcaagcgcggctctactttagcactgattttcgccgggttgcgccaatcacgctggatgtcctgtgggatcattttctggcacgtcactgggatgaattggtgccagacatcgctctgccagcgtttattttgcaggctcagcagcaaatcattccgcagctcccgcatacgcctgaacgtttccagaatctgaatgcttatctgtggcccgaacgttggctggaacgctatgccgagctgccttttatcgcgaatgtgttacaaggcatggcgaatcgtcgtcctaaactgtctgcactggctggctcgttttacgatattgagcaacattatcaaccgctggagcaggtattctggcagttctacccacaaatgatgcacaaagcgcagcataaacagatttagcctatcggtaagtctggtatggcttatttgatttaagtcacttgctctttatgtcaaagtgggtatcttaacaagacaaaagatacaaaattaagttattgatagatagaaactatcacagcaattggtatatagacctttattgattgtggctaactccctatgctgtgacgaaagttttatcccaactcgttaatccatccctattaacaggagtaatttatggttctggtaactcgtcaagcccctgactttactgcggctgctgtacttggtaacggcgaaatcgttgaaaacttcaacctgaaaaagcacctgaacggcaaaccagccgtcctgttcttctggccaatggactttactttcgtttgcccttcagagctgattgctttcgatcaccgttacgaagaattccagaaacgcggcgttgaagttgttggtgtttcttttgactcagaatttgttcacaacgcatggcgtaaaaccccaatcgaaaacggcggcatcggcgaagttaaatacgcgatggttgctgatatcaaacgtgaaatccaacaagcctacggtatcgagcatccagatgctggcgtagcgctgcgcggttcattcctgatcgacaaaaacggtgttgttcgtcaccaggtagttaacgacctgccactgggccgtaacatcgacgaaatgatccgtatggttgacgcgctgcaattccacgaagaacacggtgatgtttgccctgcacagtgggaaaaaggccaggaaggtatgggcgcttctccagacggcgtagcaaaatacctgtctaaaaacgcttcaaagctgtaatcaagccgaagtgaaattgggttaaatcctgatttaatcgaataatatcaaccagtcggttcacgctgactggtttttttacgcccatacctttcccagcaccatcgcctctctccttttcttgttactgccccttattagtgcaacgtgatcccaccgacatttttctacgtcacttttaattgtcctgctctccgcgctgcaaaacggctcgcaccgagctaatctgtaaccggttagttaataaacaaatcatttgttattaaataaataattggcgtgatgtttgcaccaaaaggtgttgtgaatactcggcaacaccagggacttaacccgtagatatgtcagagatttatgaaaaataactcattacaggagtcagtatgcttttaaaaaaatggacgatgcctttgactgtcgtagccttgttagttagcggtaacttacatgcagcctctatgccagcagtggaagctaaaaatggcatggttgtttcctctcagcatctcgcttctcaggttggcgttgatattctgaaaatgggcggtaatgcagtcgatgcagcagtggccgtgggctatgctcaggcggtcgttaatccttgttgcgggaatatcggcggcggcggctttatgaccattcatttagccgatggtacagacacctttatcaatttccgtgaaacggctccagccgccgccagcgccgatatgtatctggataaagacggtaaagtgactaaagatgccagtctgtacggctatctggcctccggcgttccgggaaccgtattgggcatggacagcgcacagaagaaatacggtaaattaacacgtaagcaagtgatggaaccggcgattcgtctggcgcgggaaggttttatcctaacgcgtgctgatacagacattctcgataccaccaccaagcgttttcgtgaagatcctgaatctgctcgtattttcctgcgtaaagacggttcgccctttgaaccgggagatagactggtacagaccgatttagccaatacgctagaagctatcgcagaaaaagggcctgacgctttctatcaggggaaaattccacaggcagtggaagatgcatcgaaaaaaggcggtggcattctgaccgcggcagattttgccaactatagaattaccgaaaccgcacctgttacctgtagctatcgtggctataaatttgtttcagccccgcctcctagctctggcggcgtaaccctgtgcgaaacgctgaatattctcgaaggttacgatgtgaaaagcatgggctttaactcagcggcctatattcatacactgaccgaagccatgcgccacgcctatatggaccgcaacaccttcctcggcgatcctgaatttgttaaaaatcctatcgatcgcctgctcagtaaaagctacgccgatgagattcgtaaacaaatcgtgccgggcaaagccacgccatcagaaaatgttcagcccggtaggcaacctcacgaaaaaccggaaacgactcactattcgattgtcgatcatgaaggtaacgccgtttcaaccacttataccgtgaacggccgctttggtgcagtcgtcatcgcaccaggtaccggtttcttcctcaatgatgaaatggatgattttaccgtcaaagtcggcgaacagaacctgtatggattggttcagggagcgactaacgccattgcccccggtaagcgcccactatcgtctatgagcccgacgttagtgaccaaagatggtcagatctatatggttctgggttcaccaggcggttcgcgtatcatcactatcatactacaaactgcgctgaatattatcgatcacggtatggctccgcaggaagcggttgatgcgccacgcattcatcaccaatggttaccggatgaggtgtattacgagcaacgcggtgtgtctgctgacagcctgaaaatcctgaaggaaatgggctataaaatggttgaacaaagcccgtggggagccgccgagttaattctggtgggcttgccgaacgtggcgggcgtgtcgccggctaattcaggcaatgactctgcggtttcaggcaaagttcgggaaggttatctctacggtgccaacgatgttcggcgcccggcaggtgcagccataggttattgataaattagatttatttatatctttcgatttagataatgaaataaagccccacacctgaacgactgttcgataaaacaccccatccgttatggatggggtttatggttaccaaggcaatgcgcgcccctgataatcgataaaagcatggccgcccttacctgctaacttctcaacctgatccaccacgccacgcacgctagtgctaatggttaaaggtgcagcatcaccgcccatatcggtttttacccagcccggatggaaggacaataccgttaatgaattatccgccgtttctgccactaaatgacgtgtcatcatattgagcgcagctttactggctgaatacaaaggcttatgcccgctctcattgctagtaatactgccaagctgcgaggacataaacgccaatacgctgttatgtggcttgcgataaggcaataaatgctcggcaatacggataggagaaacggtattagtttggaataaggccagaatttcttccggtgtcgccttgagagcagattcatgctctgggcctgctacacccgcgttcacaaaaatcagatcaaattgctgccctgcaatctgtggcaaaaatgcctcaatgctggccggctgattaatatccaataccagccagcgagagtgattggcaccggtttctttggcgtgctgacgagtcgtggcagtcaccgaccagccgcgctggttaagttcatccactagacctaagcccagcccacgagatgccccgataattaatgccgttttcttagttgcgctcattgtttatccttttccactcgtattgccgcattgacgcttaatgattagcagcgggaatattcaccataggacaaaaacggcaaggaaaaaagtggagaaatcagtcgctgtaattcaattattttgaatccacggcatttttcgctgtggattatgggctttagtttcatgtcagactcatagagtcagtacttacccactccgcgccacaggctgaagctttctccagccaattgcagatttacattctgcgcattcaacatgagctggctatcaccttcctcacgccgccagttttctacattaagcagcggcgactccggtaaactaatttcagcgccctgaccgcgctgcaacgcgatcaatactcgctcctgtcggtaagtgcgcacaaacaccagtgaatcaccactggcgaacaccacctgacagccaccgcgccgtagcgctatactttctcgccgcagggcaatcatgcgctgactcaactcaagcagttgtcgatcccactgattttcatcccacgggaaggttttacggcagaacggatcgttttcaccgtctaatcccacttcatcgccgtaatacaggcaaggcacgccgatccagctaaacaaccagcctaaggccattttcatgcgggattgatcgcctttcagcaaactcataaaacgagcggtatcatggctatccaactgattaaataagcgtagctggcagttatgggataaaccggtgcggtagccgtccatccattgaacgcactcagccgcatccagcgttatcgggtgagcagcaacgtcaactccggccaaaaatgcccgaaccggtaacgcaaaccccatataattcatcgccgaatcttcaacgcctgcctgtagccagttacgcgcatcaccaaaatgctcacccaaaatataagcttggggattttcttgtttagccgcctgataaattcccgctaaatggcgcagattccccttggccccccccctgctctccaagcatatgaaccacatccaaccgccagccatcgatactgtacggcgggcgtagccaatgacgcactacgctatcatcagcctggtaaatctgattcaccacgccatcagcggcaaaattcagcttcggcaagctacggttgcctttccagtccaacgcctgcccgtcgggatagaagttaaaccagtcgcgataaaccgattcgacatcgtggcaggcgccaccggttccctgttgatgccggtcaaaccagatatgggaatcaccggtgtgattaaagacgccgtccagtaccagcttgatgcctgcgctatgggttttttcccgtagttgcagaaaagcctcattaccacctaaatagggatcgacctgataataatcttgcgtgtcgtatttatgtacgctgggggcggtaaaaattgggttcagatacagcgccgtcacccctaaattttgcagataaggcaacttttggcagataccggctaaatccccgccgtaaaatgtggaagacgcatgaatgtcttccagcggctcatcccactctcgccgcgccaccggacaatcggccgcatagtggaaatagctaccgttttgcacgcagtgactgccctgactactggcgaaacgatcgggaaatatttgataaaaaatctgatcggcaacccaatccggccccgagtcaggtacatcaacggcaaactgcgccagctgagccggaggcaccaccgaaaaacccagcggactaaaccattgctggcgatcggcccagagcaatttaaaacaatagcggcgagtcggctgcccttcacgcagtggcaaagtcccgcgataacggcgaaaaccatcgtgatcgcgacctttcatcgtcagcagccactcttcattatccggctcacagcgcaaaaaaacctgctccggtaagtcatcaccctgtaaccatagactgatgtgtaatgtgtcatcacgtaaatgtatgtaagggggaaccggtaaatgccaaccactaagcatataactctccactattcagcataattatcgcgcgatctgacccaagagcgcctatagcatcgataaagtgacccaatatctcaatatgccaacgatgccatgttgctggtgcaatcccctcatctgtcagcataaatatcagggaggagccggggggaggaggaagcagaaacaagctttacctcaggtatactgcccgctgatgacaaaataaataacagggagaatgccatgggcgtagcggattatctggataagattattgactgggccaataagcgctcagatattaccgcactgattctgaccggttcgctggcgcgtcaggatcggatgatcgacgaactttcggatatcgatattgaaatcattgccgaacgaccgcaggatctcctgaaaaacagcgactggatcggcgagatcggagacatactgacctatctcccgctcgatcccgatgaaaatcaggcgtgggcaacccggctggtgttctaccgcgatggaaccaaggtggattttaccctcgcagatagtacgcggctgcaaaccatgatcgatgccgcaacgctggactcgctgtaccagcggggctatcgggcgttactggataaaaatggcgttgcttctcagttacctgccgccagcggaataagccagcaacccccattgcccactcaaaaacagtttcaggccagcgtcgaggaattctggtttgaagccgctcatattcctaagtatctgtaccgtggggagttatggacggtcaaactacgagactggaccatgaaggagctattactacagatgatggaatggcaagcactggcaaaatcaacatcggacgtagatacctggcatcaaggtagccatatgccgcagtggctggcaccacacatatggcaagagctgcaccaaacctttggtcaatttgatgcggacagcgcccgccaagccttttacgccagtattcagctttatagccagctggcgcgtaaagtggctgaatcactcagcttaaagtatccgcagcaggtcgaagatggggttttgtctctttgtaaaaaaatcgaaaaactgcctaaaactaaccgaacgcattaaaacgtcacccataaaaaaaccgggttattagcccggttttctggatgtattcaatcggcaaatattatttagataatgctaccgacgcagcctgttttttctgaaaacgcactttcaggtagtagcccgccaacagcaaggccacccatatcaggccgacatacagcgaaatgcgcgtcgttgggaaataaccaatcaggccgataataaatagcaggaaaataatcccagcaaccgaggtaaacaccccgccgcgcagagggaaatccaatgctttaacctgatctttggtcaatgaacggcggaaagcgatttgggaacacagaatcatgatccacacccaaacggtcgcgaaggtcgcaagtgatgcaatcaccaagaagacattttctggcatgatgtagttaagataaacggcaatcagcattgcccccatcatcaccaacaccgtcacccaaggcacaccgcgcttagaaatcgcaccgaagactttgggcgcgtggccttgttcagccataccgttcagcatacggcccacgccgaatacatcgctgttaatcgccgataaagacgcggtaataaccacaaaattcaggatacctgcagcaatagtaatacccaaatgctggaacgtcagtacaaatgggctaccgtgagtgccgacctgattccacggataaatcgacataatcacaaacagggtgcccacataaaacaccagaattcgccacggcactgagttaatcgctttaggaatcgattttttcggatcttctgcttcaccggcggtaataccgatgatttcaataccgccgtaggcaaacatgaccagctgcagcgacagcatcatgccgacaaaaccgttactgaagaagccgccgttcgtccacaggttatgaattcccgtcggttgcccgccgttgcctatcccccagacaataatgccgataccggccaaaatcatgatgatgatggtggcaactttgaagaaggagaaccagaactccagttcgccaaagaccttcacgctcatcatattgatcgcaccgataatcaataccacgctcagcacccatatccaatgaggcacgtcagggaaccagacgcccatatagataccaaaggcggtcacatcggcgatagcgacaatcaaaatctcaaagcagtatgtccaaccggtgatatagccggccatcggccccagataatcctgcgcataacgggaaaaggagctggcctgtgggttattcaccgacatctcacccagtgcgcgcatgatgataaaggcgacgatgccgccaatcagataagccagcaacacgcttgggcccgccattttgatggcgtccgccgagccgtaaaacaggccggtaccaattgctgaacccaaggccataaaacggatatggcgagtagtcagcccgcgttttagcttatttttgactggtaattccataacaatatcccgtcttctttcagcaaaaagccacgagcaaaggcgcgtggctaaagatactctcttctgcggcaattactgtttggcagtaactcgttgacgtccacaaatgcgatcgtagaccgctaccaccaccagaatcaacaaggaaggtggcaaccaagacaggccttggcccgccaacggtaactgttcagtccaagcaggcaggaaatgcgcaaaggtcgatgtcttgattccacccaaaataccgaacaacaggctgaccaacatagttggagccacgatacggctggcattacgccaccaacgcagagtgaagctcagaatcaccagcacaatacacggaggataaatcgccgtcattactggaatggaaatttgaatcaaatggctcagccccaaattggataccaacatggagaaaatgcccagaatgaataccagcgctcggtaagacaacggcagatattggctaaagaattcggctaaagcacaggtcaggccaaccgcagtgaccatacaggcgatgaagatgagcgccgccaggaacatactgcccaaaccgccgaaggtatgctgtacgtaagcatgcagaatcactgcgccgttttgcgcatcaggtaccaacgtaccgctgctgccacccagtttgaacaggctcaggtaaaccagcgtcagacccacaccagcgattaagccagcccaaatggtgtagcgagtcagcaagccggaagaaactacaccgcgagaacgcgcagcattcacgataacaataccgaataccattgctcccagcgtatccatggtcagataaccattaacgaaaccggaagagaaaggcacttgctgatagatttcggttgcaggaatctgcgggccagcaggccacagaaccgcagcaacgcccaaaatagccagtgcagcaattttcagcggagccagaatatgcccgacggtgtccagtagacggcctgggtaaagcgaaataccaataaccagcgcgaaatagatcaggctataaataaacaacggcaatgggccatcgccagtcaacggagcaataccaatttcgaaagaaacggtcgcagtacgcggagtagcaaacagtgggccgacggccagataacagacggtcgccaaaaccaggcccgcagtacgaccaattggcgaactcagcgcatcaataccgccaccaacgcgcgccaatgcaataacggtgatgaccggcagacccacggcagtgatcaggaagccaagtgcggctatccaaacgtgctcgccagactgaaggccaaccataggcgggaaaatgatgttgcccgcgccgacgaataaggcaaaggtcataaaacctaatgccagtatgtctttagatgataaacgatgactcatagtggttgtcgtgttgcctagttaaaaggaccaaaaaggaaaaccctgggttgttgtctttccggctcgatcgaaaacgctataacgcttcacagagagcgctaatttccgactaatcggtttcgatgatttgcagtgtttttgaagttatatgcagatggaataaaccaacaacgggggctaagtagaacgtttatagcggagaaaggcaagtctggatcggaaaagcagagtcatcaaccagataattcttcaatactagttaaacatgtcggttattgagaaatacacgccatatgatttgtatcatttttaatcaattattagcattgggcggccttcaccgcccaaaaactcaccaaatgtcgttagcaatatcgactaccagcctgagttttttccactgatcctgctccgtcaggctattcccttcttccgtcgaagcgaagccacactgtgggctaaggcagagttgttcaatatcgacaaatttggccgcctcggcgatacgttctttcaccgcctgcggttgttccaaggtgccatttttcgaggtaatcagccccaaaaccacctgttgctgccccggtttgataaagcgcagaggttcgaaaccaccggcacgttccgtgtcatattcaaggaaaaaagcgtcgacgttaactgtgccaaacaatattttcgctactggctcataaccgccctctgaaatccaggtcgagcggaaattaccgcggcacacatgtaaaccaatagtcaaatccgccggcttgcctgccagtgccttattgagcacctgagcatagatctgcgccaactgctctggatcttcaccacgctctctgatctgacgctgctgatcgtccgaacacagataagcccacacagtatcgtccaactgtaaataacggcagcccgcatcataaaaggcctgaatagcatcacgataggtctgagctaaatcgtcaaaatacgcggtcagatcgggataaacctgcttatctatagcgttacggccaccgcgaaaatgcagcacgctcgggctggggatagtcattttagccacggagtttccggcaatactttgtaaaaaaagaaaatcctccagcattggatgggatttaaagcccagtttgccaaccactttgatactgcgagcgcgcgtctgaacgccgttaaactgaatgccctgctcgacatcgtaaccttcaactccttccaaaccttcgaagaaatcgaaatgccaccaggctcgacgaaattcgccatcggtcaccaattgcagccccgcctcctgctgctttgccactatgtacctgatttcgttatcttcaatttcgcgtaactggctagcgctgatatcaccgttcaggcgctgctggcgcgcctgtttcaacgccgcaggacgcagcaaactgccgacaacatcggcgcgaaaagcaggggtcgttctttgcataacaggctccagatcctataccgccgactaaagccgccacggcacaaataatttaccgaatggatagtttctttgagttacaaatagacatccagacgtccaaataaattgactggagagtgtcatctcaccgattttgattcaatagaggaattttcactgcatatgaaataaattcatatccaactaaattagtgggtaaatcccagcgctgaacgggcctttttcaagctttcttgcgataaggggagatagccgtcacgactcaccagttcttgcccttctggagatagaattcgctgcaagaacgccgccgttagcggttctagaggtttatcaggggctttattgacgtagatataaagatagcgggacaaggggtaacggccatttcgaacattttcggcggttggcatgacgtaatcctgccctgataccgacaaaggtaataatctgacgccactggcgcgaaaaccaatgctggcataaccgatactgttcagcgaggttgcgacagcctgaaccaccgaggctgaaccaggtaattcattgacctggctgcgaaaatcgccgccgcacaaagcacgctgtttgaaataaccgtaggtgccggaagctgagttccgactataacgctggagagaacgcccagcccacgggcctttcagcccaagatcagcccataagtttactggcttattatcaccacataattgattttgcgaataaatggcgtccagctgtgacaaactcagccccaccagcggattatcctgatgcaccagaaccaccaacgcatccaccgccacaggcacggctaaaggaggatagccatagcgttgaacaaaagcggcaatctcggcggctttcatcggacgactcatcgggccaagttgagctgcacctgcggccagagccgtcggtgcggttgacgaaccggcggcctgaatttgcagattaatactcggatactgatgattgaaatcttccgcccacagagacatcagattcgccagcgtatcagagcctacgctggaaagattaccggaaagcatcccaaccggtgcctgagcaaaaaccggagtgctgacccataacattgcacccagtaacgccgttttgctccatttcatcatcagaatatcgtccgtaaagcctaggttttgaccgcattctcagctaaaaccgtgggaacaatcaatcgcttcggtaaggtgaagacaaaacgcgtccccaaaccaatttcactcatgacctctaaacgcgcatcgtggtgactcagcgcatgtttaacaatcgccagcccaagcccacttccgccggtttgccgcgaacgggctttatctacccgatagaagcgctcggtaagacgaggaacgtgctccggcccaatgcccggcccgttatcactgacctgaaactgagcgccctgcggcgtcaattgccagcacacttcgatttttgtaccggttggcgtgtgatttaccgcgttatacaccagattggatacggcactgcgcaactggtcttcattaccaaacactttaagctgttcattcacgcggaaagtaatctcatggcgaccgctgcttaacgcctgaacctcatgctgtagtagcttcagcatcagtggaatatccactcgctcattcatatccacatttggtgctgcttcgatttttgataacgtcaataattgcttcaccaaaccgtccatccgtttggtctgctcttgcatggtattcaaggctttaccgcgcaatgccgcgtccagttcctgatcgtgcatcatttccagatagccttgcagtacagttaacggcgtccgtaattcatggctaacgttggcaaagaaatttcgccgcgcgccttccagttgacgcatttgcgtcacatctcgcgccaccatcagtaattgcccttctgaataaggcataacgcgaaactcaacgtaatggccattattaagctgcacggtcaatgggcggctgaattcctgctgttgcagataatgggtaaattccgggtaacgcagcaggttaagaatgtgctggccgttatcttccggccaacgaaagcccagtaaattctgcgctaatccattacaccaaaagatatttccctctacggtcgtcataaccaccgcatcgggcaaggattcagcgccgctgcggaaacgttttatcaacagcgccagctcacgccgccgccgccgattacgcagttgcatctgataaagaccataaaacagcggctcccagctccagcgtccggccggtggcgtcatgcttcggtctaaccatagccaatgagaaagtttaagctggttataaaaattccagatcagcgctgccaatactgaaaccagtaatagccaagggagataaccaatgaaaagcccgagcaatagcgcgggcagacaaaaaagtgccagctcaatagccagccttttccatgataagcgttctagcacgacacattctccggcactacatacttaatagcgcgttgagaaacggtatccggtgccccggacggtttgcaccattttgtcatgcccttcggattcaagcgccttgcgtaaacggcggatatggacatcaacagtgcggtcttccacataaacgttagtgccccaaacataatttagcaactgctcgcggctgtaaacccgctccgggtgagtcataaagaaatgcagtaatttaaactcggttggccccatgtctaacgctttttcgttagccatgacccgatgagaagaaggatcgagacttaacccttgcatttcaatcacctcttccacggccatcggtgaaattcggcgcatcaccgctttgattctggcaacaagctctttgggagaaaaaggcttggtaatgtaatcgtcggctcccacttccagcccgcgcacccgatcctcttcttcaccgcgggcggtcagcatcatcaccggaatatcccgggtcatggcttcacgtttcatatgcttgataaactgaatcccagagccgcctggcaacatccagtctagcagtaccaaatcagggaaaggctcggacaagcgcgtaaccgcgctgtcataatcttcggcttctaacggttggtagccgttttgctccagcacaaaacacaccatctcgcgaatcggcgcttcgtcttccaccaccagtatgcgtcttgccatcgtcaatcctgccaatatgttagcggttgctatttgatttccgcgccattatgcgtcagttttatgacagttttatgaaaaaaaccatccctttgcagccaataagcatagcggctaaccgaaagggtgttgcaaggttatttcagcaactttgcgaagccgttctgggatttcaaccaatcctcctttttaaccgcgacatccccttctcaacgtttataatcagcgccattgattacctgccctagcgggagttttatgcgcattatacatacctcagactggcacttaggccagtatttcttcaccaaaagccgggcggcggagcatcaggcttttttacgctggctaatccaaaaagttgaagaacatcaggttgatgcgttaattgttgccggcgatatcttcgacacaggttcgccaccgagctacgcccgcgagttatataaccggtttgtggtcgatcttcagccgacgggctgtcagttagtggttcttggcggtaaccatgattctgtcgcaaccttaaatgagtcacgcgaactgttggcctatctcaataccaaggtgattgcccacgccagcaacgatctggaacaacaggttttcattctacacgatcgtgaagatcagcccggagccattctgtgtgcgatcccttttctacgcccaagagatctgatcgccagtcaggcgggagaatccggatcgcaaaaacaattagcactacaagaagccatcgcggcacattatcagcagctttatcaaacggcggtcaacctgcgcaagcggctagcattacccttgcccattatcgccacgggtcacttaacgaccgtaggcgtcagcacctccgactcagttcgagacatttatatcggcacgcttgacgccttccctgctcaggctttcccccccgctgattatatcgctctgggccatatccaccgcgctcagcaggtagcaaagtcggagcatattcgctatagcggctccccgattcctctcagttttgatgaactgaataaagagaagagcgtatttttggtggagttctcagggcaaagccttgccggggtggagactctgactgtcccgcagtggcaaccgatgcaattaatcaaaggggatttacggcagatagagcagcagctcgctgcctttagccaactttccggcccaccggtatggctggatattgaagtcgccacccaagactatctcagcgatattcagcgacgcattcaggcattgacggagaatctcccggttgaagtggtactcctgcgccgcagtaaagagcagcgccaaaacagtattcatcagcaagagaaagaaacgttgaatgagctaagcgtcagcgacgtattcgaacgtcgcctcgcgttagaaacggagctgaccgaacaacggcagcagaaaatgcgggaaatgtttcaacaagttgtcgatgaagtcacgctgaatgccgatgcaagagaagaataagtatgaaaattttaagcctgcgcctaaaaaacattaactcattacaaggcgagtggaagattgattttaccgccgagccttttgccagtaacggtcttttcgctattactggctcaaccggtgccggaaaaacaacgttattagacgcgatctgcttggcgctgtatcaccaaacgccacggataaaagtctcacccagccaaaatgagctcatgacacgccacaccgctgagtcactggcggaagtggaatttgaggtaaaaggcgtcagctatcgcgcattctggagccaacgacgagcaaaaaactctcctgaaggcaatctgcaagctcctaaagtcgagttagccctatgcgcggacggtaaaatactggcggataaagtcggtgataaattgtcacttatcgcctcgattaccgggttggattttggccgtttcactaaatccatgatgctatctcaagggcagtttgccgcctttttgaacgccgatgctaacgatcgcgccgagctgctggaggaattaaccggcacagaaatttacggtcgcttatccgagcaggtctttgaaaagcataaacaggctaaagccgagctagatgccttatatttacgagccaatggcattgagctgatgaatgaagaacagcggcaggatttacaacaacagttagacgcgctgcatcagcaggaacaacagttcagcgtcgaattgctcaatctgcaaaatcaggtcgcctggattacggttttgcgccagttgcaacataatgtgcagcaatacgctcaacaacatctgcaggtggaagaagagtatcaacgggttcagcccgatctccagcgtttggcgcgcagtgaacccgcagaaaaactgcgtccattgcaacaagaacgggatcgctgcctgcaagattggcagcaagcgcagcaacatatcgcaaccttaaaacagctgcaacagcaacaacagctacagctctcgccgctgacgctagccttggagcaggccaccagcgcccagttacagcacgctgaacgacagcgcgagaaggaaacactgattgaacagcatataattcctttagacaaccatattgccgctcaacggaaaaccttgtcgcaactcgatgaggataaacttcaacagcagaataaaacgcagaaaagccagcaacagcttgaacaagatgaacgcctgctaatggaaactcatcaggggctgcaacagttagctgactacattcagcaaaatactcatcatcaacattgggaaaagcatctgccgctctggaaagaacagttccgtcaacagcacagccaacgccaacaactcgctgataatcagcaaattttgcaacaacaagcggcgcagattgttgagctgcaacagaaattcgccgtactaagcgctcaaggcgtacagcagcaagctgcattggcgcaagccacaatgcaggctgacgccagcaaacaacagctggaggcgctagaaaaacagcaacctcaggcacaattgcgtcaacggcttgctgaacttggcgagcaaagaaatacccgtcaacggctcgcagccttatcgccgctggctctacagctacaggcccaacatcagaaaaaccaacaatatctgctcgatcaaaaccagaaactggtacaactcgagcagcagctgatagaaaaaagacagcaatacgcccaacaaaaacagcaccttgctgatttggaaacgctatgggatcgcgaaaaacagattgtgacgttggcggcagaaagagccaaattgcagtcaggaaaagcctgcccactgtgcggatccctagaacacccggctatagccgaatatcaagcggtaaaaccgtctgaaactgcgctgcgcgtggaggcactacgtgcgcaggttgatgagctgtctaagacgggcagcggattaaaagccgaaaaagaaaatctgcagcagcagaaatcacgtctggaacaagaattacgacaaagtggtctgcagttagctgaacatcagcaaaactggctggcgctgaccgcgcggctagctctgaatttcactctggatgaaccggctcagttaactgcgtggctagagcaacaggagcaggaagagcaagaatatcagcagaaactgtccgaatttgagcgactcaaccaacaatatcagcgagctaaagacgcattggttcaagccgagcagaatcagcagaagaacctgagtgaagtcggcctgcaacaacaacgcctgcaaaacattcagcaatctcagcagcagttacagcagaccgaccagcgtcagcaggacgaatatcgactgcagcaacaggatttcctcaatacattaatcaatctcgatctacagcagccggagccagagcagcaaactgagtggctagatctgcgggaatatgaatggctgcgctggaagcagaatcagcagaatcagcaacagctggtattacaacaaaaaacgctggaaacgcggatagaaagcgaacgccagcgccaaaaagaataccgcgaccaattattgaatattgagcaaaagctcagccaggcaaaccgtgcgttgcagcaatatattcatcaacgtcaagagctgtttggcgataaggttgttgccgacgaacgacaaaaactgcgaacagagcaacagcaaatcgagctagcgcaaaaggccgccaacgaagcactgcaacagttgcagtctcagttgagccgattgggcggtgaattagctcaactggaacagcagttgcagcaatatcagcagaaggccacccaaactcaggccgaattccaacaggctcttgccgccagcgagtttgatactgaagtcgcttttgcagcagctttattagatgaaggccaacgccactctttacttcaactgcaacagcagttgaatgaacgcttgcaagaagcagtaatccgcttgcagcaagcgaatgacagcctcaaccaacacctgaaacattgtccgtcaggtatctccccacacagcgatttatccgaacggaaaggaattgcagagcagatggctctgcagctaaaagctaacaccctgcgtcagggggaactgcgtaatcagttagagagcgatacacatcgacgtgccagccaatcagccctgttcgagcagatagaacataaccagcagcaatacgatgactggaactacctcaatcaacttattggttcaaaggaaggcgataaattccgtaagtttgctcagggcttgactctcgatcatctggtttatctggctaataaccagcttaaccgactgcatggccgctatttactccaacggaaaaccaatgatgcactggagttactggtcgtagacacctggcaggccgatgccattcgggatacccgcacgctttcaggaggtgaaagcttcctggtcagcctgtctctggcattagcactttccgatctggtcagccataaaaccagtatcgactcgttgttccttgatgaaggcttcggtactttggatgccgaaacgctggataccgcgctggatgctctcgacagcctgaatgcgacgggcaaaaccatcggtgtgatcagccacgtcgaggcaatgaaagaacgcataccggtgcaaatcaaagttaagaaaattaatggattaggcattagcaggcttgataatgcttttgcagttaattaagcgcagagttatggaaagatgaagcaagaagcagccaaaatccaagctcagaccgtaagattacttcatatcaactcgtgaatgcctagtgaacgttgaatctagagtttgtggcattaggtaaattagcaccctttgctattaatctaatgccgctttcgccaaccaatagccgcttattacaggttgagaaaagcggctattcatattctctaatacataatgaaattaagcgtcacatagagatctagcatgtattgggtattgggtattgggtattgggtattgggtattgggtattgggtattgggtattgggtattgcgcataaatatagccattgatggacaaaggcaacggacgaggctattagccaccaaactgccctgataagattcctgatatgcctgtagccgcccgaaggagcgacagtcaggcaatcacactattgctgtggccacagccatgcagcaccacgcacgccgctggagtcaccgtgtatcgccttgtgaatcggcgtttcacactccccgccgaatacccacggacgtatcaaatcaggcaatgtacgatacaaacgatcgacgttactcataccgccgcccaatacaatcacatccggatcgaacaggttaatcacgtgagccagtgatttcgcgaatcgttgctcatagcgttgcatcgcctgctcggcaataacatcgccttgttccaccagagtaatgatttcatgtcctttcaagagattgccgcttaaacgaaaataatccatagcaaagcccgtacctgacacaaaggtttcgatacagcccttcttaccgcaatagcagggaacctctaattgataacgttgttcatcctcatcctgccacggcaacggattatgcccccattcaccggcgataccgtttccaccagaatgaacacgcccgccaatagcgatacccgacccacagccagtaccaataattgccgcaaagaccaaatgtttccctgctccggcaccgtctgtcgcttcggaaacagccagacagttagcatcattagccagtctgaccggacgggcaagcaagtcagataaatcgcgatccaacgtctgcccattcaaccataccgaattggcattttttactttcccactaaagggggacaaagtgcccggaatacctacgccaacgcttcctttttcgccagtagctacctccgcatccgtaaccaaaccggcaatagccgataacgtttgatgatagtcatgacgaggcgtttcaatccgcttacgaaaaagctctcgcccatcattcgccagtgcaatgacttctatcttagtaccacccaaatctataccaatgcgcattgcgcctcacctcattgagctgatgactttattttcagcgaaattttttaacggagtcacgcatcattccgcaaattcagacgtgccgattattagctattgcatactagtttggacaatcattaggtatctcacaatctttgcatttatctatttgacgctaccgacaatttaaataattcatcaccctcagcgagccatgcgttgtagtactttttcacgcaatatttcgattcagcccccaattcatcacgctattttgctagggactgcggcttcaattcgttatcatgccgccctgcgtttgattaacacgcgtgctttaagcgcgcccgagcttgggataacactatgctgtggtttaaaaatttaatggtttaccgtttgagccgggaagtttcactgtctgcggacgaaatggaaaaacagttaagcgccctttctttcaccccttgcggtagccaggatatggccaagaccggttgggtgcctccgatgggctctcacagcgatgctttaacccatacagttaatgggcaaatcattatttgtgcgcgtaaagaagaaaaaatcctgccttcaccggtgattaagcaagagctacaggccaaaatcgagcgtttggaaggtgaacagcaccgcaaactaaagaaaacggaaaaagactcgttaaaagacgaagttctgcatagcctgttaccgcgcgctttcagccgttttaaccaaacattcctatggattgatacggttaacgatttgattatggtcgatgcggccagtgccaaacgcgccgaagacacgctggcgttgctgcgtaaaagcctgggttcgctgcctgtcgtacctttaactttagaaaaccctatcgaactaacattgaccgaatgggttcgctccggtgaattacctgccggtttcgcgttgatggacgaagcagagctgaaggctattctggaagaaggcggcattatccgctgcaagaagcaggctttagtcagcgatgaaattgcggtacatatcgaagcgggtaaattagtcaccaaattggcacttgactggcaagaacgcgtgcaattggtgctgtctgacgacggttcgctcaagcgcctgaaattctcagatacactgcgcgaacaaaatgatgatatcgatcgggatgatttcgcccagcgtttcgacgccgattttattctgatgaccagcgaactggcagcattgatcaaaaacctgattgaagctctgggtggcgaagcgcaacgctaagtttgccgcgcatttgaagacgttgccccctctggcatggagagggcaatattttgattagcttaggtatttacacagataagcagaggcttctgcaacttgcaggttaaattcactctgtccaggaatgtaaaaagtttctcccggcataaacacctgccagtcaggagagcctgggatcaagactttcaatgccccagtaattaccgtcatttcctcgggttgggcggtactaaaagtgtattccccttcttccattaccccaacgctcgcgcgcccaatgctgctactgtcataaccgatggacttcactttcccggtaaaatattcattaaatttcagcatagtttggcacccgcatcctaatcattgatgagatttcatattagggtcacagcattgattctgtcactgattattacgacaaaatgcgatcgcaagccgattcactggggtggttgctgataaagcgtacaatagaggcaaaaaaaccggggcaatcgaccccggtgatgataacaacagaagaattatctaatcacagcgttacataatcagttcagcagccagcttcgccaccagcacgtttgataacaaaaccggtattccgagccgacgctgtaaaaaatcgcgatgtttttggtgatagccaatgcaatccagcacaacaacctgtgccccctgttgcagcagcgtttgcgcagcttgctcaagtgcctgctcatcggccaaataagggctggcgatggcaaaacagggaggtgacgccagcatttcccacttggcggcctgctgttcgatttgctctgagagtggcactacgatcccgacctgatgatcgctgacaatcgccgcgatcaaaggcggaatgatgcgatccggctccagcagcagtgcctctcgggttttcaaatgatgaaactgcccggtgcatagcagtaaaataatgcgacatccctgcgcttcaagttgctcaattttctgctgtaaaccgcgttccactttgcttgcagccaaagaaacctgagtgccatcgctcaaacgcgaaaccagcacatggtcgccgcgctcaattggctgatattgttcctctacctgtttccaatccagcccatccagcaggccaatatgtataacctcatccgacggtaggtattgggataacagcggcataatatcgctgcgcggtgcctgacctagggttaatgttgccaatgacgcattcatagcgcggcttcgccatgttcgggatggcgttgttgtagatgtatcaaagagccataaagtgcaataagccgtgcatattcggattcgtcataaaactgacaggttccacggccaaactctttcgctacttctacggcaaattttaccgcgagcgcgatatctgtctcatggctggcaccggttccacagccgggtactaccgactgagtacaaatggcgacgccaaccaccggcgctgaagtggccgttgagggctgcataatactgtttaggtgatgcacaccgttaccataaggagtgatatctggaatagtaatagggaatgtaacggcatggcttccgctggtcatctccataatacgcagcaaatcttcggcaacgcgcaggatataaccttgcttaactgtaggggataacgcatagcctttataattgatgatgcgattacctttagtggtatcaatcgataaaatcgcatcggcttccagcatcacctcgttatcattcatggtgatgtcatcaataggggaatccataaaatcgacgggatcgtgtggccgagttggcgcattggggcaaatgtgagtggttatcaccacatcaccggccaaaatatcgcctttactacgcatttccgccagtttaagcgcgctggcaatggctgcaatggcaccgtcagcatcagaaaccacaccaatgcgttcaggccgcgcaccaataccgcccaaacggccgataatgcccagcgttggcgccgtgccacccagtgttttacccgcacttcccgcaatctctattcgtacaaaatccgtgctgccttttggcccagtggcgcggaccgtgctggccttaactcctgaataatcaacaaacagttccacgatatcctgaccagaaacatgggcactatcaatcatttcaaaaacgcgtaatgtttgttgcaagctcatcaggactatccttcatcattaggtctcagcaggcagcggcatagctatttgcccttactggataaaatggagctaaagaagttgtacaatgcgtcgccggcaataaaacctgccgccataatttgcattggtgtacgccccttttcaccccaacatttagtaatcaaaatgcgcaaagcaattcctagcaccacagcccaaccggctagcgcgttattgatcagtaatcccgtcgccagcagtatcccaagttgacgttttgggccgccaatcaactgaataattgcgcctggaatagcccaaatcatcaggctaaacgcaatgcctggctgcgcaccggcctcaatggttttggcataaacgcgcgccatcggcggcactaaatcctgtgcgaaataccccatatgagtgaaccacaccaccggaatggcgataacaaaagcaatcagcgccgcaaataactggattttccgccctatcagctcctgcttcagatctttaccgtatcctcgcagaataaatccggctttcagatcaaagcccatatcagcaaaagcaggcccagttgcagctgtaaaaccggttaagatgcataatgccaacggcggaaagccgatcaaaataccgacgatcagtgtgatcaaagcaacggcaaaagctgggaaccaaccggagtgcatagctgcaatgccaacgatcagttcgtgaataaaagcggcaaaagcggcataaaaaataaaaccgatcaacatgccggtagacatatcgctgtaaagcccaccagccagcgccagcaaggccgcaatcacgacataacccacggcacctataccgagcgctttacgaacctccgttgccggttgggtatagttctttttatccgatactttcttgctacgaatcacctggatgacctgaatcagagccacaaatcctgctccgaccatcactccgtggggaatataattggcattaatatcaaatccgataagcggttcaatataggcacgaatcaataatcccacgccaaacatgcttaatgcccaaatattaccgataaaggcggtgccaaaagcggccatcggaattttgaatatggccccgacgacgccaattcccacgccgacgaccaacagccaggcatgacggccccctttgtcaccggctttaatcgcttctgctgctgcaacgcccggcggccaggcattctctgctggaaaaattttggtatcgaataatcgatagagtaaataggcatccagtaacatcgcggcggcgacgccacaaaacatcggtaaaattagctctggctgccccataacataaggaacagcaataggcatcaacagactatttgcagcaccaaaggttgccgacgaaataacagtttgtgccaggttttgtgtatgaatggatcgatagcgttgaaaaaactttagagggatacgagccaataacatggcaaataatgcaccaatgattgaagtattgggtgtcacccctaaagttgtaatcaattggacgccaataattgcgccaatactagaaagaaatatcatcactaccagcgtgccgatatcccttagttgattccctgatgtttgctccatttttatctccctgagttccgctggtgttagcgctagctatcaaataacacgataatattagttccctggtgaggcgctaattaggttattattaatggccaaactcctatcaatggagtttatttggctcacaggtcttcccatggagaaataaagcaaataaaaaatattttttaaataaagttaaaatttgcaaatcttagctagctataaattattatttttcaaccagtaatcatcatttaatttctcagctaataatctggttgtagaaattaatgcttcaacatattcactggggtaaaacgggggttcatccgaactcggaaaagacaaacatagcccaatcgtttcactgcgatgcttattgctgatattggtcgctattgagctaacgccttgtaaagtctcattacgagcaaaagtccagccgacctggcgcgccgttgccaacttatctaataatgctgccagattctgcggagcattggcagagcgtggtttataagagccaaaatgttcacgaacctcatcgtcactctggcgagccaaaatagcccgacccactgaggtttccgcggcaggagaacgggtaccaaccggcgtaaccaccggtaaaaattgttgcccctgaaacattcgcaaaaccataatttcctgcccatccaacgcagaaatataaccggtgcagcgcgttatttgactcaatttaatcatcattgaagccgccatatcgactaaaggcgtagagagatattggctggatattgataataataaacgaccaatatgatacaaccgcgtatccggatctcgctctaataaaccttccgattccatcgtcattaataaacgtgacgtcgtactttttgccaatcctaattggttaataacatcgctaaaggaaatacccggatgagcatgcatgacgttttgtttggaaaataactttagtactgccgaagcattttctaatgtgctcattttaaatgagttccaatatatgaaactaagttcccgattgaatgaaataaaactagaatccttctgtcatatcgtcaagttttttatttaatttaaaatacaataattagctaacacacatactttataatgaaaaattgaaatttttatcgaagtaaaacgaaaaaatacaagtttaattctcattaattaattagtggcaggataaagctctgataactacaaagatgtaattactcaaaattatgaaaataatgctctgatatttaattacctgtagaaactaaataacgcctctcttacagagtctttgctgaaaatatgggctttgctgaaaatattgactgaaaccctgttcacattttcagtacaaccgaaagtcaggcggataagttagagattacgtaagatataaacggccagtgaagcttcaaatacaatgatggagatcgaccagaaagccggcatgaagttacggtgttgacggagataaagcttgatatgtctcatcagcctcgccttaattggcatccgatgcaggtaaacagaggatttacactgaaattattacgtgggatataattgtactcttgctatacaattcagacaataatgacgagaaaagtcacgacaaaaacatgccactcccctgactgacgactctagtgaggaaacaccgttgatagaaatgaaaaacggcgataaatcgccgttttaactcagattttcacctgtagtaaattatttcaccgtggcatcagccaataattccagaatttgttgtaccactgactgtggggcctgactggcattaagaacataatgggcaacctcttgatacatcgcctcccgaacagccagcacatcctgtatttcttcagcaataggtttaccagtcaaactcggccgctgcgcgtcttcaggctcctcggctaatctttcggccagaatatccgccggcgcacgcaggtaaatcactatcccctgacgacgcataaatgcccgattctctgccgcgagtaccgcgccgcctccggtagccaccacggttttaggtacggtaacttcctgtaataccaaactttcccgcagcctgaaccctttccaaccctctttggctaccacttctgccaccgtgagctggctgctttgctgcataaataaatctgtgtcgataaattgatatcccaacgcctgcgccaacgctttccctatcgttgttttacccgcaccgcgtgcacctaccataaagatagttcgagtcattgcctgatcgtccttttgcatcaaattctctggataaggtttatgcattaaaaaaccggtcaccaccatggaccggttccacagaaagtaaacatttgctggcttatcgacagccaaagcgaatcatacctgtaattaggagtagtgcaaactttacgaaaccgtaaattatacgatacaccctatttccaattacccctcaataacctgaggggcattttgtatcaaaaatctacgctggctctcaacacaaactgccgaggctcgcctatcgccacgcgataacggttaccgctggaaggatagtaggttgtatcgaacagatttttcacattaagttgccatttcactcggtaatcctgaattggcaaggtgtaagcgataaaggcatcggctacggtatagtcgtccagagtaaagctgtttgctgcatctcccgcccgctttccgacataacgcacacctgcgccaacccgtaagtcgtccccaccatacagtccggtcgaacccatttctttggtcaggaacaaggaagcgctgttgcgtgccacgttcgccatctgattgcctttatttttcggatcttccgtcacccgcgcatcggtgtaggcgtaggtagcaacggcgctgacgctatcggtcaattgccccgccacgtccagctctacgccctgcgagcgaacgcgacctgcggttcgggtcacagtttcagtgccgataagctcattcaccatgacattacgtttggcaatatcaaacagtgccagagttccggtcactccgttgaccatttcgaccttgctacccacttcccaggattgtccttgctccggcggcaattcaccgatctgggtcgcaatggatgagttgggtttgaaggattcgctgtaactaccgtacaaagacacttctggtgtcagcttgtacaccacgccagtgcgtggaatcaatttgctatccgaactctgtgtattgatgataaacggacgccctttgccagcaaaaacgtcaaagctgtcataacgcagcccggctaacaaaatccatttatcacccaattcaatagaatcctgcgcaaaccagccataacttttaagattttcacgctgatcgctgtctttagcactcacctgcgtagaaggctgcatcaagccgtaaatcggatcgtaaatattaaaatcggagtttttcttaccgcgaatcatatcgctgcgataggtacggttatcttcataatcaaacccgaccaatacttgatgactcacgcttccccaaatcaaatctccgttcaaagttgcctgcaccgcttgtgcacggcttactgcgctggcggtggcgtcagcctgacgggttagtacgccggtattttcattcagagacagtgcccgagcctgattatcgctatagcgattgcggttataagcataggtcagggagcctttccagctatcattcaacacctgatctatctgtagcgtaatattgtcctgatcgccgcgcgtagcgttaaaaggctcgtcgaaacggcgtttacgtggcgtatcgaccggtttgcctgtgcgtgagtcaataattgtgccgcgatcgaaaggcgtgaggtattccatatgttcgtaggccaaacgcacggttgtcgtttcgccataccacatcagtgacggggcgataaccgtttgacgattacggccaaagttacgccaataatcggtttcatcgtgatcgacaatcatacggtaagcaaaaccggattgccccagcgggccggtcacatctaactgaccgccaccaccgttaaaactgctgccccaaccttctacatgagtacgctgcgccagctgcggtttcttggtgataacgttgatgacgccacccggctctcccatgccatacaacattgaggcgggccctttcaacacatctacccgctcggtagtcggagtgaaattacgagcctgcgccgaccgtacgccatcccgtaaaatcgatccgtcgcggttatcgccaaagccgcgtttcatcagcgcatcctgcgtaccgcccaacgtattggactgagtgataccactgacgttatataacgcttcatcaatatttctcaccgcctgatcgcgcaatacctgcggagcgaccacattgacagcctgcggaacattcaacaagttggttgaggttcgcgttccggtcgttgatgtggtgggctgatagctgtcggaatcttcttcgctaagctggccaatcaccaccattttggttttttcactgtgcggcgcagtttcagcttgagcggctggcatcgccaccagcaaaggcagaccgagccaaggcaagcgacgaatatcactgattttcattgttgaggttactccaataagtccctgaaaaagttaacggcaaaaattgttcatataattgttggaatgttttttgtgggtcgatatcggcaaaaagatcggggtaaaacgctttggcaaacatctccaccgccacaacgtggtaagggctgagataaaagttgtgccacatgctgtaggcacggtgctgctgaacggcattcaagtgagaaatgatgggctgcccggccattaattgctgaaaactgtgttgagcctgactggcgctcaccatcggccctaattgcaggctggaaagacgcttacccgttgggccagccataccggttgcaatataaacgtctgggttggccatcagaatggtttcaggattcagctcgccatagacagttttaattcgcgagcgagcaatattgtccccaccagcgaaatcaattaaatcgcccaagctaccgcgggaagcggtggtacagcagctttctctacgccccagatgcaactgaagcatcaccgtgggcttcggcccctgatgttgtgccagccgttgttggataacctgcatatgttgctgataaaaagtgatgaactgctcggctctagcctgacggttcagtaactcccccaataatcggatgctgggaaccgtgttattcagcatatcgacgcgtaaatcgacgtacaccaccggaataccggctttcgataatccgctaagcatgacttcttcatcggcatcatttttggcatagcgcggcaacaccaccacgtcgggatgaagctctatgattttctcgacatttatctgacggatattcccctgcgcgataattgggactttttcaatatcagggaatttctcaacgtactgctgccaactttgagcatcgtaataggctaaatcccccggccagccgataattcgctgagccggattgccctcttcaagtaacgctaaggtatagagcattcggctctcgcctaagatgatgcgctggggattctcaggtactacaacctgacgccccataatatccttgagtttttttgcctgagcgttaaatgacattaataacaggcaggttattaatattcttgaaattattcccatgatgtttcactaaaaacaaacaatcgcgcatgataatagttctcacttgcattttcaaattatttgaaattaataaaacgcaaaaagaggaatgcacggtgaagcattcctctaaactattttatatttctgtttgaccatttatctgtattccatactgcaccacctttgattaacaaggttcgcgcggctggcagatataaaccaaggcgggagggaaatttcggactacgcgcattttcttccaggtaaaatagcgagataacaaaggctcggacaaatgactatattgaaacagtatcaatgagccattgcgttgccgtaatctttgttgagtttgctgcaatattttcatgctgattttggttggaatagacagtaaaggcaggcaacagaaaatggcgtcgtaatgtaaatccaacagctctgccgaacgcgccgcaacctgtaaacgcggatcgtcaattttatttaattcatcaataaagtgagattgaatttcataggcctgtagcctggcatccttttccattcgcgataaaatccgacgggtcaaaacaccatccgcagcccctaattccgcgattgtcatcgccggcatccactcaacctgatttagcatggtttggcacagccaaggagatgaaggcgccaaagtgccaacagtacgcggagaggcaataaaccgctgaatatatgagaactgacttttaaaattacgtcgcacggtgtttaacatagcctgtcccattaagtccggatagaccaccataacaccttaaaaacctgaatatctctttaagattgttctaagagtcaggtatttttttcgtaaaaaaaatagcctattaccgtcatacaaagcgcttccctcctggttaaaatattattcggctaatcttagataataaaaattggcaaataaaaagagccccaattggaagctacagcctgctagagctataactttcaatcagaacccttacgccctcagcgaaatttgagggatattttaagcgctaggaatttattgattagcgataaatttcagcactggccgtatagtaacttgaatcacctggggaactgatgccaatgacacgatagtggctggcgccgtcagcaacggccttggcattcaatgcggcctcaacatcgcttggtgagccgctgatgccggatacggaaactacgcccattgcctgcaattggctcgcctgttcgcgattaacttcttgggctgccaggcttgaaaaagaagcgctggcgataaacgctgcggtaataaaggttaatagtttcattttagctccaactttctgattattctcagtgttcagtgagattaattatgcgaagaataacgaaagcggacgtaatgctgagtaaataaactcaatcattgtggggaaactaaggaggaattgagttaagttatttcgccaaaggaatggctaataacggtagctatatagccaactttgccctctaataaaacaacctttggggttggcttaaatcaaagggtaaacagcgtcagcgaatgattgtatacatgcacagaaatgcaattggcgattttgctgccattaccgaacgtcatgaatagagggaaaaatggtaatattaagagagttggcttcagaagaactggatgcctaccgacatttctttattggggagtacgctgaagatctgagcgctaattgcggctacagtcaggataaagcacgacatcaagctcacttatccttcgttcaatcgctaccagacggtattaatacgataggaaataaaatttaccgcattgaaaataactataggctagtgggttatctttggtacggattaaatgacggcggcgcttcggtttatattaaggatttttgcatattgcctgaatttcagcggcaaggatttggaaaagccagcctgcaagctttagaagcagaactcgtcactcagggaatttttgaaattaagctacgggtagcggcagataacccacgagccaaaaaactgtatgaacaattagaattcaccgttaccggattcaatatggttaaaacactaaacaaaccatagcttgttgttcaccctggcaacggctcatcataaaataattgctcttcactgcgaggcaaagacgccagtagctttgaagctatttttagcaatacctatcatactgactcgatacagtctgaacgctgggagtggttaagccaggactgatttcatgcaggcaggattaactgcatgaaatatgatggtcgttattcaccatccaaatgctgtaattgatttcgataagattttactttttggcgcttcttaaaccagatggtaaatgacaccacaaaaataccgccagccagcgtcaaaacgcccatttcttgctgataaaacagcatgataataaaataaacggcagaaataattgcaatccacttcgccgtatgaccaacagagtttttttcattagtcagacggcggatatgctcttcctcgctaattcccatcatttattccctctgtgagtgaacttataatattgggccagacgtatgataatacaacataattttctgttttaattttcatcgctcaggaagaatctgattgacctttttcaatcaaaagagtttacgagaatgcgccttcagttatcgccgctagattccatcctgaaattttctggacttgaagctttgctgcttttccagctcaaagatagctcgctgcaaccccttttcctgcattggagacagtttgggaaatttaaaactcaggcgcgtcattgtgacggtttcgcctttgttactaatcacttttttatctactgcacgtatgaattgcaggtccagatcaaaagagccaaactcaccgagatccaataaagagccgcgaagaatctcacacccttccaacggcaactcactgtctttattggaaaacatgcctacaccgcccaaagagatatccgtgagtgtgtgcttaaaagcggtgccattaggaaacttgccagtacaataaaaaggtggccattgtgggatgttgattcgaaaatattcgcgccgttgaataaagtacaaagaatcgggaattgggctgctaaacgcgggtagaccgaaataggtgatctctgtttgtgtggtgcaggagaattcaattttggcaccagcaggttcggcaataaaagttagctgttcggaatcctgtgctaacagattttcacgttcaacgctgccaaaatcaaaaatgaattgattagcatctggatgaacttccaaaatgcggctgataaattgcccacgggagtgcgtcaccattatagcggtattattttttttcagatcccgcaaaattgcgcaaatagctaatcgattctttttaacatactgttctttcgatatctcactcacctgccgatccccaccaagaatttttgattgaattaccctagagaacaccgcaaagagtataaccgtcaatcaaattatcggcagaagttaggaaacatttattgactcttatccgatatggcacaaatttctgcaattggctgcaaatgaaaacgggcacctgaataagtgcccgcttgatactatttcaatccgctagctacgaattaaatcatcgccgtaacctatccacttataggtggtcagagcttctaaccccataggccctcgggcatgcagtttctgcgtactgacggcaacctcagcccccagaccaaactgcccgccgtcggtgaaacgagtgctggcattaacgtaaacggctgaggaatccacttcccggacaaaatgctctgcactgctgagcaaacgggtaagaatagcgtctgaatggcgggttccgtgctggcgaatatgctcaatcgcggcgtcaatatccgccaccacgtgtacattcagatccagagcgagccactcatcgtcataattcgcctcttctaccggaacgaccttcgcaggcccggccagcaaatacggcatcgcttgctcgctggcatgcaaagtgacacccgcactttccattttgctgcttaacgcggctaaaaaggcggcggcgatatcccgatgaaccaacagagtttccagtgagttacaggcgctaggacgttgcgccttcgcattttcaatcaccgtcaatgctttggcaaaatcaacgtcggcatccacaaaggtatggcagaccccaatacctccggtgatcaccggaatagtagattgctcacgacacaatttatgcaggccagcgccgcctcgcggaatcaacatatcgacgtagcgatccaaacgcagtaaagcattcaccagtgcgcgatccgggctttcaatcgcctgtaccgccgccgccggtaaaccgctttgttccagcgctcgctgaatcactttaaccatcgcctgattggtatgatgcgtttccttaccgccgcgcaggatcaccgcattaccggttttcagacacaggctggcaacgtcgatagtgacgttgggacgagcttcataaatcacgccaattacgcctaatggcacccggcgacgctctagcttcaggccgctatccagcaaccggccatccataatctgccctaccggatcgcttagacggcaaacatcgcgcacatcgttagcgatcgcagctaaacgcgcaggcgtaagtagcaaacgatcgagcaaagcttcgctcattccgctggcgcgcgctgcagccatatcttgctcatttgcctgaaggatttcgtcgctttccgtctccagcaacgccgccattgccatcagggctttatttttttgcgcagtactcaatacgcccaattgccaagaggcctgtttagccgcttttcccatctcttccagcatgctagctccttagctgataatcataaactgatgatcatatcgtcacggtgaacagcgaccgggccgtattcatacccgagtatttcactgatttgctgagaatgatgtcccgccaacatacgcaatgcatcgctgttataacgtgagacaccgtgagccagatcgcggccgctcaggttacgaatacggatcacttccccgcgggagaaatcccctttcacgctacggatacctttcggcaatagcgagctgccccgcgccataatggcggctaccgcgccatcgtccacggtaatttcaccggctggcggcgcaccaaagatccagcgtttacggttttccagcggcgtttctaatgcatggaaacgcgtgcccaccggcgtgccgtcaatcacatctcggataacatcaggttgagcacccgcggcaataatcacgtcgatacccgctcggcacgcgacgtctgcggcctgtagcttggtcgccatcccgccggttcccaaacctgaaacgctatcaccggcgatttcacgcagcgcgtcatcaatgccatgaacgtcccgaatcaactctgcggcagggttattgcgcggatcggcggtatataacccagcctgatcggtcagcagcaataatttatccgcaccggccagaatagccgccagcgccgagagattgtcgttatcgcccactttgatttcagccgtagcgacggcgtcgttttcattaataaccggaacaatgcggttatccagcaaagcattcatggtatcgcgggcgtttaagaaccgttcgcggtcttccagatcggcgcgagtaagcaacatctgcccgacgtggatgccataaatagagaacaactgctcccatagctgaatcagacggctctggccgaccgcagccagcaattgcttcgatgcaatggtcgctggcaattcaggataacccaggtgctcacgcccggcggcaatcgcgccggaggtaacgataacaatgcgatgaccttttgcgtgttgctgggcgcactggcgcaccaattcaacaatatgggcacggttaagacggcgagagccgccggtcagcacgctggtgcccaatttcacaaccaaagtctggctgccactcataatttttctgccattgggatcaataaaaaggaatgatacagcagactttgtagcaggagacaggcgttatgccaacaggcataacgcgaaatcaccgctttattgagcagaaaggggtttatgcagagagtttgatgggctgttcgccgaaatcctttgccggttctagcgtcagatccatcgtcttcagcatttcatggaggcgtttatggaaaccacggagcgtagtttccaatttttcctgaacctcaggatctttgattttttgttctttccaacttccctcggtattaaacaagccgagttggtatacataagtaaaacagctgtctttcgactccagctctatccaccacccccagaactcacgtttttcgggagcaagtttcacattgacgcacacggctagacaatcaaagaaaaagcggtcgttctggcactgcccttcacgtagatatggccctaaagctgcaaaacgtttcatcagtttgcttttcgggtgagcgctggatatcgtcatgcttcaatctccttaagtagacgcacacctttttagcaaactgttaaattttagcaactaattaacgcattttatcttttagccaatcgcaagtttgcaacagagctctatgaaaactgtcatacagcggcgttgaagggatgcttaacagcttgccgtcaacggaagaggacacgatcagtttcgcatcttctttcggactaaaaggatcgttttcccaatatccggccagcattggcgtatggcaacgccgtcccaacaacccttgggttttgagagaaaaacggttcagctcagtttttaacgtatcatccgatgcatccgccatacctaaccggctggccagcacatccatatacatatccggcacccgactctggctgttactgtcgcaaagcaggtgatggacgatagggcctacgcaggccacgccgcgtaaacgctgcggctccaaatagcccaaacgcactgcgacgttggcaccgaaacggaaaccaaatagcgaaacacgctgatgatcgacccagggaatcgtcggcaaagcctgtagcacctgctgatgcagatagctggtgtcctgcgttaatttccagcgcgaagatgagccgacggaaggcatgtcgatagtcaacatcgcgatacccgccggtgcaagataatcgcggaagagacggtggtaatcgctctgcaacatatccaggccaccacacatcagcaccgttgggaaaggcgcactgccaattgtcggcatatgcagaaagccggtcagcgttccgccatcctgaatggggaaactcagctcttttaaagtgaaaggcagatattttgccgcttcttcataggctcgattagacaaaatttccgcctgctcggccaattcatcaccacgcaaatgaggataaccggcgatgctgtacatgttggctgcattcagccaatactgcccggcggccagaggatcggtttcttccatggctttttgctgccacatcatgccctggtgagaccactcgtaaatccagttgccgttgcggtaacccaccacggtatccagtaattcattatcactgtgttctgcattagacatcgcaatccgcgccagcacctcttcgatttccagaggatccactccgcgccaggtccacatcaagcgattgatcatacgataccaatgacaggtagtatcgccgtccaatgcggagtgaatattcatggtttggttgcaatgagcatgcctgaccaaagtcgaggtctcaggatgcttgaacttgggtttaaacaggatttcagaaaggttggcttgtgccatggttacaatagcctccataagccgcgatcccgccttggtttaggctggggaatatggggttagtgtactcataccgaggaagaaatgaaacgtccgacagcgtcggacgtttaaagctgcgtaaattatttgccgcctagcggttccacgaaggtcacagccatatcccacggctgctcaatccatgtatcctgaggaatatcaaccacatagtcatcaaccaaaggacgacctgccggtttagcgaaaatagtcacaaagtgcgctttcggatacatttcgcgaatggctttcgcagtaccgccggtatcgaccagatcgtcaatcacaatgaagccttcgccatcgccttcggcacgtttgagcacggtcagctcacgctggttattgtggtcgtagctggagatgcacacagtatcaacatgacgaatacccaattcgcgcgccagaattgcaccgggaaccagtccaccgcggctaaccgcgatgatgcctttccactgttccgcaggaagtaaacgctgtgccagcttgcgggcttgtatttgcaacatatcccaagttacgacgtatttttcgctcataaaatgtagtcccagccgtattaaagtggcttgtcatgtatcgaaggggaaaaaaggttgcgcgagattatagtgaggcaacaagataaaaaccagcaattatcccggtaattccgcgaatcgaatgcggtatttgtgcggccaaacgcgcgcaacgcaaatgaaagtgatattctcgataaatcgcgccatagcaatggcggttagtccttaaccctaaaacctacagtatctcagacgcctccgcattaatctggtgtctgtatgagcatgctgttaaaggagacttacagtgtctgaactgtctaaactttcgcctcagccgttgtgggatattttcgctaaaatttgttctatccctcacccttcttatcacgaagaagaattggcgcaatacattgttgcctgggcaaaagaaaaaggtttacacgccgaacgcgatcaagtgggtaatatcctgctgcgcaaaccggcgaccaaaggcatggaaaaccgtaaacctgtggcgctgcaagcccacttggatatggttccgcaaaagaacaatgacactgttcacgatttcactaaagacccgattcagccttatatcgacggcgaatgggtgaaagctcgcggcaccacgctgggcgcagataatggcattggtatggcttccgcgctggcggtactgtctgacgacagcgtagaacacggcccactggaagttctgctgaccatgaccgaagaagccggtatggacggtgcttttggcctgcaaccaaactggctgaacgctgacattctgattaataccgattccgagcaggaaggcgaaatctacatgggttgcgccggcggcattgatttcatcaccactttaccgttacagcgtgaggcggttcccgcaggctatcaaacgctgaaactgatcgtcaaaggtctaaaaggcggtcattccggcgcagatattcatttaggtttgggaaatgccaacaagctgctggctcgtttcctatttgaacatgaagcggagctcggcctacgggttctggatctgaacggtggtacgctacgcaacgcgattccgcgcgaaggtttcgctattttggcggttgcagccgataaagtagatcatttgaaaaccctgactcaggactatttagacatcctgaaaaacgagctatctgcggtagaaaaaaatctcaccgtggtgctggaacccgtcagtagcgcagcgaaagctttgaccgctgatacccagcaccgtctgctggcattgctgaatgcgacgccaaacggcgtaatccgtatgagtgatgaagtgaaaggcgtggttgaaacctcactgaacgtgggcgtcgtgaccatggaagaagataaggccgaaattatgtgcctgattcgttccctgatcgacagcggcaaagactatgttgttagcatgctaaccgccgttggccaactggctggcgcgcagactacgcctaaaggcggctatcctggctggcagcctgacgcaaactctccggtcatgcatttagttcgcgaaacctatgagaaactgtttaacaaaacgccaaatatcatggtaatccacgccggtctggaatgtggtttgttcaaaaaaccttacccagaaatggatatggtttccatcggcccaaccatgacaggcccacattctccggatgaacaagtacatatcgaaagcgttggtcaatactggcaattactgaccgcattgctgaaagccattccaaaacgcgcttaagcgagtaccgcactatcattacgaacggcgccgcctgcggtagcgccgttttttatggcaaatttgctgctagaaaacccagaacctggcatctatcccagcgctattcccaattcagcaataattgccgttcaatctgcggatccagcaggctgacatgcaatcccaccagtcgcacacctctgtccgcccgtcgctcatcccaaacttgcttggcaatacgcaataaatcgaccttgttcaattctggccaaacgtgttcctgagtcgtttgctgaaaatcctgaaatttaagctttacgccctgacgagcaatttgcagatccggcctgaccttagccaagcgggcttccagttcggggaaaagtttttcaataatctcaacgcattcttcccagtgatgaatatcctgcgccagcgtcctttctacgccaacggatttacgcaaccgatcgggagatatacttcgctcatcaataccatggcagcgctcccataatacccgcccaaatttaccaaaggttttcagtaaatcagccaaaggataattttggacatcaacacaatgagttaaacccaattcctgtaaacgcttagccgttacttttcccacgcccggaattttgttaagcggcaaagtttgtagaaaaggttgaatttgatccggtgtaataacgtattgtccgttgggcttattgatatctgaagcgatcttggctaagaatttgatcggggcgattccggcggatgcagttaaacctaattcctcatgaattgactggcggatctgttgagcaattaaggttgctgaaccgctaaaaacctgactttcggagacatccagatacgcttcatccagcgataatggctcgataagcaaagtgtaacgggcaaatatttcgcgaatatgtaaagaagcttctttatatgccgccatacgccccggaatcacttttaaatgcgggcaaagcttcaatgccatcgcagtggacatcgcactatggacaccgtaacgtctggcaggataattggccgtgctgataacgccacgacgatctgcgctaccgccaatggccaaagggatatcgcgtaaactggggtcatcccgcatctctacggctgcaaaaaagcagtccatatcaacatggataatcttgcgcactctcactcccatcggcaatagacaactgtataagtatacagtaaaaaaagccatgttcaagattgtcctaatttaaatgccgctaaatatttctaatttccagatcgaatactgttatttacatttaagcgattttttcatttatttttaataaaaaagtactacattcgataaagtcgtagagtaatgtttttttataaagtaaaacacatgtatagagaaattcaatttaaatgggttatacggggtatatattatgcggaattatattatggcaagtatattaatcttattttcattacaagttatgtcatctccttcagctaatgaaccgccgaaaatagtggcgcaccgggctggtaccggagacgcaccagaaaatacgctccctgcaattaagaaatcgttggaaaatggagctgatgctatttggattaccctacagttaacaaaagatgatgtaccggtactttatcgaccttccgatttaaaagaactaaccaatgtttcaggaaaagtcagagactatacgaacaaacagctatcaacagttaatgctgctaaattctataatgaaaaaaataaaaccgcattttcagccaatattccaacgttagaagaagtcctaaagttgaaatatgtgctggaagattatcctaacgtcatgttctatctagatattaaatccccagatgccgaaaatctggctcagccttttgctcaggctctacaaaaagtgctgaaggaaaccaacagttttgaacgtacccgggtttattcaaccgacaaactgtatctgaacgctatagatcagatgaataaggacgcggggcgaaaagagcaaattcaacgttttgaaagtcgagatgaaactcgtgatgctttggtcgatataaccttaggccatcaatgtaagctgccggtagacaaaaaggagcgctggtacggattggagatgaagcgaaacgttgagttagtcgttgtggaaaaattcactcttggcgaaggccgttctcactcaaacaccgtattaacatgggataaaagcgctatcgattgtttccgctccaaagggaaagcctatattattttctttggtatcaatacagcgcaggattatgaaaaagcaaaagagctaggtgcagatgccgtgatggttaactcaccgaaagaatttaaaaaaatagtgaatgaaaaaaagtaatcgattaaatatatccttgtagacaaaaagcccggcagttaattagccgggccttttatgctataggatacgaaactgatccagtttcttctgccgggccgcttctttttccattcgctttttacgggaatcacaaggctcaggacagtcgcagactttctccatccccagcgtagcaataccgccgcagctcccctgtaaggttttgcgcttcactacatagccaatagacattccgccaataaccagcaggaagaagacgaaagacgcgagaaaaactgtcagcataactcctcctaagatcgattttgcagatagggttcgaaggcttccgaatagcgttcttcaaatcccttatctgttttaacgatcataaataccggtataccaagtagattagccagcgccagccctttttccggccccaacacatccagcccggtagacaaaccatcagcggtcatacagctaggattcagcacggtaatggaaaccaatctatggttgattggccgccccgtcgcgggatcaatggtatgagaatagcgtacgccattttcttcaaaatagttacgataatcaccagaggttgcgagcgacattctccctggttcaataatctcctgcgcactttgatcgacaccagcacccggtttttcgatcgctatacgccagggcttattttcgccattattcccacgggtgcgaacttctccgccaatatcaaccatgaaatttttgatgttctgagattgcagatattccgcaaccacatcaacaccgtagcctttggcgatggaagaaagatcgacgtacagctcaggcactcgcttaattagtgcgttgccttcaacggcgagtttatctattcccacccagccacgacgtttctctaattcttcggcagaaggcactttatcaggacgtccttcagggccaaaaccccataagttaaccaaaggcccgacggtgacgtccagcgcaccgtcggttaaccggttgatacgaatcgcttcctgcaccactttggccgtagcagcggacaccgggaaaggtttattaatttcccgactctgattaaaacggcttaattcagaatctggccggtaagtcgacatctggttattaaccacttccaaaatcctatcgacttctttttgcagttgttccggagaagaccgggacgtatcactcacatattttatcgagtaataggtgcccatggttttaccggtgagattcacctgctcagggccgcagcccgctagcaacagcactcccatcaggagtgccagccaaagtattattttcctatgcacaataatcctattattgtaaaacgcccgtcaggcatgacatcagccaccgaagtcatcaagcataatattgtcgtcctcaacgccaagatccttcagcattttgatcactgctgcgttcatcattggcggaccacacatatagaactcacagtcttccggcgcaggatggtttttcaaataattttccagcaacacattgtgaatgaacccagtgtatcccgtccaattgtcttcaggctgaggatcggacaaagcaacgtgccaggtaaagttttcattctcttcctgtagctggttgaaatcctcttcatagaacatttcgcgtttagatcgagcaccgtaccaaaagctgattttacgcttagaatgcaaacgcttaagctgatcgaaaatatgcgagcgcatcggtgccataccggcaccaccgccaataaacaccatttccgcatcggtatctttcgcaaagaattcaccgaatggcccggaaataaccactttatcacccggcttcaacgaccagatatacgaagacatgatgcccggaggcgcgtccggcatattcggcggcggcgttgcaatacgcacgttcagcataataatgccatgctcttccggatagttcgccatggaataggcgcgcaccgttggctcggtcactacggattcaaaacggaacagattaaacttatcccaatcgccgcgatattcttccggcacgtcaaaatcagcatatttgacggtatgaggttcagcttcaatctgaataaagccacccgcgcggaagggaactacgtccccatcaggaattttaagtttcaactctttaatgaacgtcgctttgttgtcatttgaaatgacttcgcaagtccattttttcacgccgaatatttcttccggcaaatcgattttcaagttttgcttcacgctaacctgacaggccagacggcaaccttctttagcttcacgcttagagatatgagaaagctcggtcggtaaaatatcgccgccgccttctttgatcgtcacccgacactgcccgcacgaaccaccgccaccacatgcggaggagacaaaaatgccgtggccagaaagcacattcagcaatttatcaccggccggtgcagtaaagcttttttccatatcaccgttgatttcaacctgaatatcaccggtattcaccaacttcgatttggcgacaagaatcatcaccgtcaacgctagcacgatgagggtgaacataactacgcctagaattatttccatgagttcttcctgcctttatagatgcacaccggagaaggacataaagcccagtgccatcagcccggtggtgacaaaggtaattcccagccccttcaaaccacccggaacatcggcgtatttcattttttcccgaatacctgccagcgccacaatagccagcatccagccgattcccgaaccaataccgtacacaatggattctgggaagttgtaatcacgctgcgccataaaggacacgccaccaaagatggcgcagttcacggtgatcaacggcaagaagatgcccaatgcgttataaagcgccgggaagtagcgatcgagaatcatctccaacacctgcacaatcgccgcaatcacgccgataaaagtgatgaagttaaggaagctcagatcaactccttccaccagcgctccatcgcgcagcaccaggttataaaccaggttgttggcgggaaccgcaatacccagcactacggttacggcaatgcctagaccgaaggcggtggacactttcttagaaaccgccaggaaagtacacatcccgaggaagaaggctaacgccatgttctctacaaacaccgcgcggacaaacagactgatgtaatgttccaccgtcaattactccttttcaatctgcgcaggtttcagggtacgtaagccccaaatcagcatgccaatgataaagaacgcactaggcgctaacaggaacaatccgttcggctgataccagccgccgttttgtaccgtttccagcacggtgacgccaaacagtttgccagaaccaatcagctcacgaacaaagcccaccagcaccagaatcacgccgtagcccaagccgttaccgataccatccataaagctttcgatcggcggtgacttcatggcgtaggcttccgcgcgccccatgacgatacagttggtaataatcaaaccaacgaataccgaaagctgcttcgaaatctcataggcgtaggcacgcaaaatctgatccaccacaatcaccagagaagcgatgatcaccatctgcacgatgatacgcacgctgttagggatatggttacggatcagcgagataaagaagctggaaaatgccgttaccaaggttaccgccagcgtcattaccagtgcggtttccagtttggtggttaccgccagcgccgagcagaccccgaggatttgtaatgcaatcgggttgttgtcaaacaacgggccgaataaaacccgcttaatctctttgctatcagccattttttaacgctccttcgcgcacttttttcaggaacgggccaaagccgttttcacccaaccaaaaatcaaaggtattctgtaccccgttggaggtcagcgttgcaccggacaaaccgtccacggcgtaaggatcgttcgcatctgcgcgtcctttcactacgcgaatagccggttccccttgttcattgaacaaacgcttaccgacccattggctacgccagattgggttttcaacttcaccacccagccctggggtttcaccctgatcgtaatagctgatgccacgtacggttttcccgtcgttatctaccgcgacgaaggcgtacatcatcgaccataaaccggagccgtagaccggcagcacaattttactggtctggccctcctcattacgcaccagatagatttccaccagattagcccgacgtttaattccggctttatcttgcgcagcggtcagagcgatgctttggctatcatcacgtaaagcctgagaacgatcgaagctggtcggatcggttttaacgaaatcaccgctttgcaaatccaacagacgcggttcaatacgagcggaaaactcttgtttgacctgctctgcatccatttttggctggagtaaaccggccacgtccagaatgttgcgttgcttatccagtaagcgctgttcctgctgtttggatttcaagccaaccgctgcgccggagaccactacggagcacaccagacacagcaagaccactaccatcagcgttttgccgatagtatcgttatttcttggtttatcactcgccacgggctttcctccgcttgatgttggcctgaacaaccacatagtcgaacagtggcgcaaacaggttggcgaacagaatcgccagcatcattccctccggataagccggattcacgacacggattaagacgcacatcacaccgatcagaccgccgtaccaccacttacctttattggtaaaggaagccgataccggatcggtagccataaagatcataccgaaagcaaagccacccaataccagatgccagtaccaaggcatagcaaacagcgggttagtggtagaaccaatccagttgaacaggaaggccgtcgcaatcatgccgatcatcacaccagcaacaatgcgccaagatgccacgcggccaaacataatgatggcaccaccgatcagaatcatcagggtagaaacttcaccaatagagcctggaatgttgcccataaaagcatccatccagctgattggttggccggtgaccatgttcatcagactgtggctgccgttaacgctccactgggacaacggcgttgcgccagagaatccgtcggccgcgttccagaccagatcgccggagatctgtgccggataagcgaagaacaggaaagctcgcccagccagcgccgggttcaggaagttacgtccagtgccgccaaagatttccttaccaatcactacgccaaatgaaatccccagtgccgcctgccagagtggcaaagttggcggaacgatcagggaaaacagaatggaagtaacgaagaaaccttcgttgatttcatgacggcgaataatggcgaacagaacttcccagaagcccccaaccaaaaacaccaccgcataaatcggcacaaaatagaccgcgcccagcgtcatcatgctgatccaactggcatccggtgccagcgaggcgccaagcatctccgccagtcgataatgccagtcggcggcaatcacctgttgcagctccgcgccgctatacaggtggttcagcgcaggaatagcctgctgaccaacgttgtacatcccccagaacatcgctgggaataccgccagccataccaaaatcatcatccgtttcaggtcgatagcgtcacgcacgtgggaggcacccggcgtcactttaccctgagtgtagaaaatactggccgtggcttcgtatagcggataatacttttccagctttccgccggactcaaaatgatgctctattttctcaaaaaaacttttcaggcccatgagttatccttcctgctcaatcttggtcaaaatgtcgcgcagtaccggaccgtattcatatttaccggggcagacaaaagtacagagcgccaaatcttcttcatccagctccaaagcccccagcgcctgagcgctgtcggtatcgccggctaacagatcgcgcagcaaatgcgtcgccagaatatccagcggcatcactcgctcgtagttgccaattggcaccatagaacgttcgccaccgttcaatccagtagaaaaagcaaagcgcttgcgcttgaagaaatggccgagggtggtgcgggtaatagagaatttatctttacccggcataatccagccgaacagctccttgtctcgcccttccagcactacggaaacctgctgatggaaacgaccaagatagccatgtgtcgcagaggccgcggttccgctcagtaccgaaccggagataatacggttatcccctgctttcagtttaccggcggtcagttcggtcaggctggcgcctaaacgcgtgcgcagcaggccaggttcttttacctgcggccccgccagcgcaataactctatcagtgtaaagctcaccttcgacaaacagtttgccaatggcgatcacatcctgataaccaatgtgccagacggttttcgtcatactgaccggttcgaggaagtgaatgtgggtgcccaccaacccagcaggatggggaccggaaaattcgttataggttatttgcccgttattctggccgcgaatgatttccccggcgccgtgacaaacgtgcactttaccttcggttaagcgcgtcaatacgctcaaaccgtggttaaaggcatcaatttgcgtggcaataatggcctgaggatcggcagccagcggttgggtatccatcgccgtgacaaaaatagcgcgtggctttgtgcccggctgcggagttttactgaatggacgagtgcgtagcgcagtccacagacctgaggccagcaaattttgctgaacctgctccgcgctcagctggttgagctcggcggcgtcgtaacgattgaaggaaacgctgtcgtctccctctatttcaatcacgacagattgcagcacacgccgttcaccgcgattaatcgcagaaatcttgcctgctgctggagaggtgaaaaacacgccggggttctttttatcttcaaaaagcgcctggccttttttgaccctctccccttcttgcaccaacattgaaggacgcatgcccacatactcttcaccgagcagtgcaacatgatgaataaccggaccttcctgtatgacctgagccggagccccggcaataggtaggtcgagtcctttttttattttaatcataaggtttgcacgattctgtcaggtgtatcaaatgctgtacgtcatccagaggagcacagcaacgcgatgattagttatttttaacagttcagttaatataatgaggtattaaccggcagcgcaattagcgtgcattttacttgcaggcatttactgatttaaataacaacattaatttctgctaatgtgacagcgttggaagatacaaaaattgcgtttcattgctcaacaaaacaactcaatatctttaacaccaatatgccttcagtagccgaggattttagcattttagcctgttgctgtctgataaaagcagtgacctggctcaagcaaacgacattatattgatcaagaatcgcctctgcactcggtaaaaacgtaaggttaattcgcttttaccgatcacagtttcttttttatacaaatctattattgataaaaatattctgactgataatctgcaaacctatactaacaaaagcagtggctcaccgatcggcagatacgatcggttcccagtaagagaagtaggaataattaatgggcaaaatcgctctgttacttgcgatgatcatttgtttgcctgcggtatccttaaccagctcagccagtgagcccgttgcggttaccaatgcgcttaaacagcaattactcggttctccggtctatatccaaatatttaaagaagagcgaacgttggaattatatgcccgtttacagggcgaatatcgattggtacgaagttatcagatttgtaatttctctggcggtcttggccccaaacgccgcgagggagattttaaaagcccggagggattttacagcatagatacgcgtcatttaaaacccgatagtaagttttatcgggcgatcaatatcggcttcccaaatgactttgataagtctcagggatactcggggaaatatctgatgatccacggtgattgtaaatccattggctgttacgccatgaccgacaattacatggatgagatatttaactacgtgcaaaccgcatttatgaatggccagagcaaagtggatattagtatttatccgttccgtatgaccgagcaaaatatgcagcgccatcgtaactcgtcagatattaacttctggcgtcaattacaaccaggttatgcctactttgcaaaaaatcgtatgccgcctttggtcggtgtcattaacggacaatatgtgattaatcgtccgttaatgtccagtgcgccagcctcagagtacgcgctcaccaaaacagaatagagcaaactcgcctggcgctattttgtgccaggtttcattgccggtcagcggctgagtggcaatgacgctgaccacatcattgggtgtggtttgctgctgaaaatctatctccacatcctgatccagcaaagtggctttaccgaaaggtgcccgacgcgtaatccaataaagattggttgagcaataggccatcacaaaacgcccatccgataacagcatattaaatacgcccttggcgcgcagttgctcagacaatgtcgcaataaagcgaaataccgcaggccagttacccggtgtgcgcggataccgcttggccaattgatttaacagccagcaaaacgcatattcgctgtcagtctggcctatggggcggaaagtgccggtctccaactgacgataccctttcaattgtccgttatgcgcataagtccaattgcgcccccacatttcccgagtaaaaggatgggtattttccaacgccacttcgccacggtttgcctgacgaatatgggaaatcaccgcgcaagacttgatcgggtaatcctggaccaggcgggctatcggggagttaaagctgggttgcgggtctttaaaggtacggcaaccgtgaccttcataaaacgttataccccaaccgtctttatgcggccctgtgccccctccgcgctgaaccagcccggtaaaactgaaacagatatcagtgggcacattcgcgctcatcccgagcaattcgcacatcaccaacctcctctactgcctgtgcagtagcaataaaaagccaaaaccaatcagggcgaagaaaccggaggtaaagcgtgcgataaggaggccatgatagcctccggtgcagagcggtgaacaccccgaggcgcgggaaactccacggcgacctcaggttattccataccagccagttattaggccttaaccatctctttttcaatcagctgaatcaagatatgaatcgctttgatatgtatttcctgaatacgatcggcgtaaccgaaatgaggcacccgaatttcgatatctgcagtacccgccattttaccgccgtctttgccagtcagggtgatcactttcatccctttggctcttgcagcttcgatcgccttaatgatgttgccagaatttcctgaagtggaaatgcccagtaaaacatcaccttcacggcctacggcttccacatagcgggagaaaacatagtcgtaaccaaaatcattactgacgcaagacatatggctgacatcagagatggcgatcgccggatagccagggcggttttcacgatagcggccagttaattcttcggcaaaatgcatagcatcgcaatgggagccgccgttaccgcaggaaagcactttcccaccggctttaaatgagtcagccagcaagatagctgcccgctgaatggcgtcgatattggcatcatcactcaggaaattagccaaagtatcagccgcttcattaagttcacttcgaattaaatcgtggtacatgggagcctctttatatgtcctgtggcatcaataatcttccgcaggcagtgtaccggatagcgcaaactgcgagaagcgccgtgatgaactgttgcaacggcttttgaccttaaatgctacgaatttgtgaaccaagttgtaattgatatgtaatggcattgataaaaacaatgagatgaactaaaaccaatacatcactcaacaggtcagacctcctacaactcaggagcttcattatgatggttcttagcattgttgccttgctggttcttattggtgtgttgttctatcaccgggtgaacctacaccttagtagtctgcttcttctggtatacaccgccgccttgggtgcgctgcaagtatggtcattctgggcgttgcttcctttggtgattgtgttgctgccactgaacttaacgccgctgcgccgctctctgttctcagctcctgcgctgcgtaccttcagtaaaatcatgccagccatgtcacgcaccgaaaaagaagcgatcgatgcgggaaccacctggtgggaaggtgatttattccaaggcaagccagactggaaaaaactacataactatccaaaaccacagctaaccgctgaagaacaagcctttattgatggtccagtggaagaagcctgtcgtttagcaaatgattttcagattacgcatgaactggctgatttgccgccggagctgtgggcctatctgaaagaacaccgcttcttcgccatgatcattaagaaagaatacggcgggctggaattctccgcttatgctcaagcgcgcgtattgcagaagttatccggtgtttccggcattctcgccattaccgtgggcgttcctaactccctcggccccggcgaactgctgcaacattacggcactaccgaacaaaaagatcattatctgccacgattggcgcgcggcgaggaaattccttgcttcgcactgaccagccccgaagcgggttccgacgccggtgcaattccggataccggcaccgtttgtatgggtgaatggcaaggtaagcaagtgttgggtatgcgcctgacctggaacaaacgctatatcacgctggcaccgatcgcgaccgtgctgggtttggcgtttaaactgtccgatccccagcatttactcggtgaaaccgtagatttgggtattacctgcgccctgatcccaactaacactcctggggtagaaatcggtcaccgtcacttcccgctgaacgtgccattccagaatggcccaactcgcggtaacgacatctttgtgccgatcgattacatcattggcgggccaaaaatggccggtcagggctggcgtatgctggttgaatgtctgtccgtcggacgtggtattaccctgccatccaatgcaaccggtagcctgaaaagtgtggcaatgggtattggcgcttacgcctacattcgccgtcagttcaaaatctctatcggtaagatggaagggatcgaagaacctttggcgcgaatcgctggcaacgcctacgtgatggacgccgccgccaccttaatcactagcggtattatgctgggtgaaaaaccggcggtactgtctgccatagtgaaatatcactgtacccacaggggtcagcgcgcagtcatggatgcgatggatattgccgggggtaaaggtatctgtctgggtgaatccaacttcgtcgcccgttcttatcaaggcgcgccgattggtatcaccgttgaaggtgccaacattctgacgcgtagcatgattatcttcggtcagggggctatccgttgccatccgtacgttctggcagaaatggccgcggcacaaagtaacgatgttaacgcttttgatagcgccctgtttggtcaccttggccacgtaggtagcaataaagttcgtagcttctggctgggtctgaccaacggccgtaccagtcatgctccggtaagcgacagcactcgccgctactatcagcagcttaaccgcttaagtgccaacctggcgctgatgtccgatgtttccatgggcgttctgggcggcagcctgaaacgtcgcgagcgtatctctgctcgtttaggagatattctgagccaaatgtatctggctaccgcaacgctgaaacgttatgaggatgaaggccgtcagaaagaagatttaccgctggttcactggggcgtgcaggatgcgctgtatcaggcagaacaagcactggatgacttactgcgaaacttcccgaatcgctttattgctggcgtgatgcgtattggaatcttcccgtttggctgcgtacatcgcgcgccgtcagatcgcttggatcaccaattggctcaattgctgcaagtgccttcggcaacccgttcacgtattgggcgcggtcagtacctgacgccgagtgaattcaacccggtcggcttgctggaagccgcactgcaagacgttatcgccgcagagccaatccacaaacgcctgagtaaagaagccggtaagaatctgccgttcacccgtttggatcagttagccaaacgcgcactggcggaagggaaaatcagcgcggaagaagctaacgtgctgattaaggcagaagccagccgcctgcgctcgattaacgtagatgaatttgaaccggaggcgctggctacccagtccccggtaaagcagccagatcggccacgtcaaacggaagcggcgtaactgatagtactcattgataattcatgtgtctaaaacaaagtcccggtctaatgccgggacttttttatcgctgatttttgatagcgaactagcgctgaacctgaaaatagcgagcagccaagcgctcaattatccgttttgacgaatacgggcaattaattcacccacattatcaatatgcaccgctgccagtattaatgtgcgccccagactcagagcctgacgctgacaggctaaacgcatcccgtcatcttcaatgctgtccaaatccgcgacgtgtgccaacccgatggtgcgcctaatcaattcggttccacagtaccccacggcatcattccacacctgccggaggaaatactcggcataaccagcagttttcaacgcttgatcctgagttttctctgcgcatagcgtcagaaaacgcgtggcaaaagcctgccaaatttcacgaatgtcatctaaacgctgttcacggcctgccgctgcgtctctcggcccggtcaaccccggcaaaccgcagtaatttagcaatacatttcctaaagccgtaccgatatcaaaaccaatcgggccataaaaaccgaattctgcgtcaatagctttcaatttaccttcggccacaaaaatcgagccactatggatatcaccgtgtagcaaagcttccgctttactcaaaaaccgatgtttaagggaagctaccgccagtttcagcccgttgtcctgacgcagcgccagcacctccggcagtaacgcggcgtcaaaattattgcgttcatgatcgtgataaggatcggtaaaaaacagatcttcagtgatctggcacagttcgggattggtataacggatcaccgccgccttcttactttgtgccgactgataaaaatctgaggtgtggaataaagtctgccccagatattcacccaactggctggccgcctgcggataatggcggcctttcaccaattcatgccgccagatgtgatgatcggaaagatcctcctgcaccatcaccgccaactccgcgtcatggtgcagtattttaaccgtgtgttcagggcagaactggctgtgagttagcagggtttccgcttcgatgcgcgctcgatccaaggtcaaaggccaagattctcctacgcaacgaacgtaaggcaatgcctgtttcaccaccacccggcttcgccccgtttcatcacggatcttaaacaccagattcagattgccgtcgccaatttcatccgccgaaaccaacgtgtgcggttcagcaatccggccatattgacgcgcatatgcaacggcatcagcagcagtaaacgtgtgataacctgacatctcccaccccttctcaattctctggtcgcccacggcgcattaattatttaggcgtaaaaacatgtagacgtctatacatctgtaaagcatgttggcagaataagaacccagatgcaataacgcaacatggatttaactgacgatgccgacgcttaacaccaccagcctgaaaatacgcgataaccagctttggattctcgatcagcaagccctgccccaacgccaaatctggcgtttggctgatgacgtagaatctttggtcgaacatattctgacgttacgcgtacgcggtgcgccgctgattggtctctctgccagtctgttactggcgctgctggcggagcgaggtttatctcaggcgcagttggagcaagcgctcatcacgctaagagaatcacggccaacggcagttaacctgatgaataatctggcacggatgcagcaagcgttactgcggccagattgggtaaattccatgatgaaagaggcgctacgtttgctggacgaggatcggattctgtgcgatagcattgccaatcacggcgcagcgttggttaaatccggtagcagacttcttacccactgtaataccggcggcttagccactgtgggcgtgggaacggcaataggcgtaatattacgcgctcatcagcagggaaaaatagataacgtttgggtcgatgaaacccggccattactacaaggtgggcgtttaaccgcgtgggagttgggcgagttgggtattccctatcggttaatttgtgattccatggctgcgaccttaatggctcagggccaggtagactccatttgggtcggcgcagatcgtattgccgctaacggcgacgtagcgaataaaatcggcacctacagcctggcggtactggcacattatcaccatattccgttttatgttgcggcacctcacaccaccgtggatccgcaatgtccaaacggagccgccattcctatcgaacagcgcgcaactagcgaagtcaccggcgtatccggcagctttggcgaatgtcactgggcacctcaagacgcgcaggtgtataacccggcctttgacgtcacgccggcaaccctgatcagcggttgggttctggacagcggcgtaatcacgccacagcaggttcaggccggatttttccagcctgaataatgtaaatgcacaagcgaccttactgagccgcctgcatttacattaatctaaacgaggataagcatcggctatcttatcgccggtaaaatgcgccacccaaccttccgggttatcaaatacccgaatagcggtgaaattcggtgccgatcccatatcaaaccagtgacgtgtatccgccggaacggaaatcaaatcgtttttttcgcagagaatctgaaagattttcccctctaaatgcagacaaaacagccccgcgccttcgacaaagaaacgcacttcgtcttcgccgtgagtatgttcggataaaaacttctgtcgcagagtttctcgctgagcgttatccggacgcatactgatcacatcccaactttgatagcctttttctgccaccagccggtctatttcatgttgatacgccgcaattactgcttccggcgacggatttccccccaacgcccgatccgcacgccaacgctcaaaacgcacgccaatacttgccaactgcttctgaatagccgttgcatcagtgctttgccagataggctgttccggctgctcatcgctgaaaatagtcaaggcactcatgatgcaaactcctctaaaacgatctgatcgaaacagttaacctgccgatgatggctttctgcatccggcaaatcgcgaatcagctggcaagtctgccaaccagcctgctgagcggcgtccagctcctgacgaatatcggataaaaacaggatatcgtgcggtgcaacggctaagtgctcagtaatattctgataagcggagacttcgcgcttcgcgccaacgcgagtatcaaaatacccgctgaataacggctgtaaatctcccgcatcactatagccaaacagcagttgttgcgcctcaactgaaccagaggaataaacatatagctttaccccttgatgctgccaattagccagctgcggagccacgtccgggtaaaggtgaccgcgaaaatctccgttttgataaccagtacgccagataatgccttgcagagcttttagcgcggtagacttacgatcctcatccataaaaccgaatagtacgctaataagggtttctatatccgcatccggctgaccaatttcacggcgtaaatctgccagcagaacggtcacgtcttcttcgctggcgtgctgacgcaaaaaatccgctaatcgggcgcgagcgtaaggaaaaagtacctgatgcacaaagcgaatatcgctggtcgtaccttcaatatcagtaacaatagcctgaatcatttgacctccagcaggcggcgttgtaattcgcactggaacaggaattctaatccttccagatgacggcgcgcttctgccactgagttcccccagcaataaagcccgtgacctcgtaccagaaaaccgtagcgtaacggtgccaacgctgcgcggcctgccactcgctcagccaatgcgctaatatcctgatcgttatcaaaaataggaataaccacggtatccaaatgggatttctgacccgacagggacttctgcatttcataaccctgtaaaaccaatccatcacttttttccacgcgagaaagtaccgtggcgttcaccgaatgagtgtgtaaaaccacgctaacatcaggatataaccgatacagcaaagtatgcaggccggtttccgccgaaggcgtacgcccgctgggcacgtgattggtggcaatatctacgctcaggaaatctttcgccgtgaggcgacctttatctttgccagattcactgaccaacgcgtattcactgtcggcacgcagtgacatattaccgccagtcgccggacaccagcctttgccgccaatccagtggcaggccgcaagtaacgcctcaagttgtgtctgttttgccatttccctacctctgcaattgttattttcgccgtgcaacaggggaatattccacgctgcccccctatgagctgacattaacacaaaaaatcatttagccgtttaaacatctaagcgtcttgattgccaaatcttaacatcgtgttatattgacagcaacatcagcgccaggagtttcagcccagaatgagcactttatcattgattccagacagtaaattacctgcccaaggcaccaccatctttacgcaaatgagtgcgctggcgcaccagcatcaggcaatcaatctgtctcagggattccctgattttgctggcccggaatatctaaagcagcgtctggcttatcatgttaatcagggagcgaatcaatatgctccaatgactggcgttgcagcgctgcgagaagcaattgcagataaaaccgccgccgtttacggctggcgtcctcatgctgatagtgaagtgacggtgaccaccggtgccagcgaagcgctgtttgctgctattaccgctctggtgcgcaccggcgatgaagttatttgctttgatcccagctacgacagctatgcgccagccattaaactggcgggtggcgaagtcaaacgcatcgccctgcagcctccggcgttcaatactcactgggctgaattctccgatttgctgaccgaacgcacgcggttggtgatcgttaacactccgcacaatccgtcagcaaccctatggcgcgcggctgattttgagcaattatggcaagccattgccgatcgcaatatttacgtcattagcgatgaagtatatgaacatatttgtttcgccgctgaaggccacgctagcgtgctggctcaccctcaattgcgtcagcgggccgttgccgtatcttcattcggtaaaacctttcacatgaccggttggaaagtcggttattgcatagcgcccgccgccatcagcgcggaagtgcgtaagatccaccaatacctgaccttttccgtttgtacgccaattcaattggccctggccgatatgctgaacgccgagcctgagcactggcagcaactgcccgatttctaccgcgctcgtcgggatcgcttcgtacaggcgctggccgccagccgcctcaaaatattacccagtgaaggaacctacttcctactggtcgattacagcgccgtttccgatttgaacgacgtagatttttgcctgtggctgacggaaaaaatcggcgttgcggctattccgttgtcagtattctgtgaggctccttttcctcatcaattgattcggctgtgcttcgctaagcaggaagccacgctggacgccgcagcggagcgcctatgtcaactttaaaactgactctactacaacaaccgttagtctggctggatgccgaagcgaatttacgccattttgcgaagctgctcgaagatatccaccagcgagatgtcattattctgccggagatgtttgtcagcggcttcgccatgaacgccgccgagttcgcgctaccggaggcggaaatcctcgattggctccgccattgggcagggaaaaccaatgcattactcggtggaagcgtagcgctgcaaacgccagaaggcgcggtgaaccgctttctgctggttaaacccagtggcgaaatacatttttatgataagcgccatctgttccgcattgccggtgagcaccatcattatcaggctggaaaacgacgtaaagtggtggagtggcgtggctggcgtattttgccgcagatctgctacgacctgcgcttccccgtctggtcgcgtaaccagcaagactatgatttagcaatttatgttgccaactggccagcagcgcgagccaaacattggcaaaagctattgcctgccagagccattgaaaatcaggtatttgtcgcaggatgtaatcgggtaggtgaagatgataacggccatagttatcagggagatagcgtgattatcgatccgcagggcgagattctgagcagcgcgcctttgcatgaaagagccagactggacgccacactctctctggcagcgctaagcgactatcgcgagcgttttcctgcctggcgcgatgccgatgattttctactgcaccactgatattgagtcgaaatagctaccgaaaaatagcgatgttaaagcgcgtctctcacggcgcgttttttattagcttcatcgttggaatagacagaaaacagtggttgggatgacgaaaacgacaaagccctgagttattgctaactcagggcttctgaatattggcggtgcggacgggactcgaacccgcgacccccggcgtgacaggccggtattctaaccgactgaactaccgcaccgcgctgttgttccggttaagaacgggttgaatattacggttaccccgctatttcgtcaacactttttcctgaaaaataaaccggttgcacagattttcacccaaacgatgaattatcccgcattgactgccgtttcatcttcagcagaagcccgccacaggcagcttccacctttcttctgaaccaaatccaaacgctggttatgagcttccaattcttcatcactggcgtaaataattttcagcccgctggccggacggacgatacgttgaatatcatcggtagaatctgattgattctgatccccttccattgagaaagacagcgaggtttgcccgccggtcatcgccagatagacttcagccaaaatctcggcatcgagcaatgcgccgtgcagcgttcgcttagtattgtctatcagataacggtcacataacgcatcgagattgttcctcttaccggggaacagacggcgcgccaataaaagactatcggttatggtacagaaggtatccgtattcggaattccctgctgtagcattcgaaattcatagtccataaagccgatatcgaacgccgcgttatgaataaccagctcggctccgcgaataaactcgaggaattccggggcgatatcggcaaaagttggcttatctgcgagaaactcatcgctaataccgtggacaccgtaagcttctggatcaaccagacgatccggtttgacatagacgtggaaattccgtccagttaaccggcggttgatcacttcaacagcaccgatctcaataatacgatggccttcatagtgaacgcccagcttattcataccggtggtttcagtatcgagaactatctgtctggtaggtgttgggatcatattgcagtgctcatagcgctcgtttatgtcagacttaaggtttaaaactcattaggaagagtctaccagagatgaccaaacaggtagaaattttcaccgacggatcttgcctaggcaatccgggtcccggtggttatggcgcgattttgcgttacaaacagcacgaaaaaactttcagtgaaggctatcgtctcactaccaataaccgtatggaattgatggcagccatcgttgctctagaagcattgacatcaccctgtgaagtcacgctcagtaccgacagtcaatatgtgcgtcagggcattactcagtggattcataactggaaaaaacgcggctggaaaacggccgaccgcaagccggtccgcaatgtggatttgtggaaacggttggacgcggcaatttcggatcataaagtgcagtgggagtgggttaaaggccacgcagggcacccggaaaacgaacgttgcgacgtattggcgcgcgatgcagccaacgctcccactcaggaagataccggctataatccggactaattccgagtcttaagggcgattacggtaacttttcgttgcgcccacggttcggcttaaccagggttttcgcgatcccattttcattgggttgaacgtcagtggaatcgtgcgttttctggccacaatcagactgatgcaacctaatgcatgtagatgggtgctgataaagcgcccgccttgtttatgccacggcagtacgtggaaactggattcatgcatcacttcatagttcagcaggctgagccaatccagtaaacgcatttgcgtaaacattctgctcgcgtaaggttggcgtcgacgtatcaccggcagtaattttccaaccccaagtaaactcaacggattgaaagtgctgattaccagccaaccatcgttgatcaacacgcgatccgcctcgcgtaaaattcgatgaggatcggttgaataagccagcgtatgagataacagacaggcgtccaccgatttttcagcaaaaggaagctggtaaggactggccagtacctgcatattgctgcccttatccccaacgttaacctgatgggaaacagcgcagctttcactggcaatctccgcactgagttgcccaattttaagcagatgaaaaccgaaaatctttggccaccagggctgtagctgttgctcaatagcggcccgataatactctccccaaggtagctcggcccaggaagctggggcaggaatcttttggcgtgtttgcgctggtttcatgttttattatcttctatcaagctgttgccaacgagaggtatccgatgaatcttatcagcattcctgcatttcaagacaattacatttggctattggttaacccgctgcagcgctgcctgatcgtcgatccgggagaagccgcgccggtactgagcgaactaaaagaaaaaggctggattcccgaaggaattctgttgactcaccaccatcacgatcacgtcggcggagtgaccgaaatactccagaacttccccaatattccggtttatggcccgcaggaaacggcacataaaggggctacgaatatcgtaaaagacggcgatagcctgtctttgtgtggacaaattttcagcgtaattgccgttcccggacacactctcggccatatcgcatactacagcgcaccttatcttttttgcggtgatacgttattttccggcggctgcggaaggctgtttgaaggttcgccccaacaaatgtacgcatcaattcaacgactcgcacagttggccgatgaaaccttaatttgcagcgcgcatgaatatactctttcgaatcttaactttgcccgtgcagttttaccacaagatcgagatattgaaacatatcaacaacaaatcaagcaattaagagcaaaaaaccactcaagcttaccctcaaaattgcaattagagcgtaaaattaatgtttttttacgctgtgatgacattgatttacaaaggaatttaggtatagacctcccacctaatgacctctccctgatttttgctgaattacgtgcccgtaaagatagcttctgaagcttttagttgtgttatttgtcgaagcaaagtatgattgctcgtcttttaagcaactaacattgacacacacatgaagaccaaagcgatatttctcgcctcagtcttgcttgtagggtgccaagcgtccaggcaggacgtgcaggttcccgtgcagcatgcacagagtttgtcttcggcaggtcaagaaagtgaagcaggaaagtacacggatagtgcccgagagggctccgcgcgatggctggaaagtgataccggcgtcgcgcagaacgatctgtggaacttcattagcgacgagctgaagatgaaggttcaggataatgccctgatccgtgaacaaaaacgaaagtatttaaaaaataagagctatctccacgatgtaacattacgggcagagccgtacatgtacctgatagtcgagcaaattaagcaacgtaagatgccgatggagctggtactgctacccatagtggagagcgcttttgacccacacgctacttcctccgccaacgccgcagggctatggcagatagtaccgagtaccggtcgaaattatggattaaagcaaaaccaatggtatgacggccgccgcgatgtggttgcctcgaccaaggcagcgcttgatatgatggaacgcctgaacaaaatgtttaacggtgactggttattaaccatcgccgcttataacagtggtgaaggccgagtcatgcaggcagtgaaagccaataaagccaagggtaaaccgaccaatttctgggcattgtcgcttccgcgtgaaacgtcaatttatgtccctaaaatgctggccttgagtgacattatcaagaacagcaagaaatacggtatcaagttacctgaaaccaacgaaaaccgtgcattagcgcgtgtggacgtcggtcagcagatagagctaactcaggcggctgagatggcaggaatgtcgctgaccaagctgaaagcttataattcagggtataagcgcaatgtaacggcacctaacggccctcattacattatgttgccgaaaacccatgcagagcagtttaaagactcactggctgacactgatattgttgtgtccaaatccactcaagtggctaataacacaaaaacatcagcatcaggttcgcagtataaagttcgccctggcgacactttatctacgatagccaagcgactgaatatcaagaccagcgatttgcagagttggaacaacttacgtacctcgagtaccttaaaagttgggcaaaccctgcaattggcaagcaatacggccagcaaaagcatcacctatcaggttcgtaaaggtgattcatttgccagtattgccaagcgtcacggtgtaaacaccaacgatgtgatgcgatggaattcggtagtcagcaaggccaacagtttgcaacctggtttaaaattgaccctatatgtcaacggtcaaaaagcgccagatgcgtaatgcattaaggttataacggctaaaaagcacccttcggggtgctttttttatgtctgcaatttgtcattaatgaaggttgacgcgagcgaattaaggtttgaattcaaccagtaagggattgtgatcggaggctctggtcaccatcacttcggcatcagcaacttttaattcgcggtaaaaaacatagtccaacggccggccaaaagctcggctacgattatcggcctgaaactcgacttcctgtaaaccctggcttctggcgaatttcagtaatgctctaattcgctgacgactccaggcattaaaatcgccagccagaatcaccgggccacgatgcattgagatttgttcaccaatgggttccaactgcttgctgtaaacgtctacgcccaagctaaaattcacagcatgaatattggccaccatcagcaatcggccatcatgaatgggataaactgttaccaatgctgatttagccaagcgtagcaggggttcacgctctcgcagcgggcagcagtagactgggtgagcggcagcaagcgtcattacgccagagggatgctgaggcagcgcaaaggcaggcacctgatcggctgcctgaaaattagacgtcgcaaatctcaccagttcaggggtggtttgtgcttcttgcaacagcatcagttgagcatctctgccaaaacctctcagcacagagagccaatctggccgctgctgcttaaagatattccataccataatccgcagacgctcagaagtcggtaatggaacgcccggaggtagtccctgccctagctgactggcagagcccggaaagatttgctcgactggttgccctgcaacatagcgcatggcataggtttttttcggcacgctcttgcccattcccgttaaaaacaaactggccagatggaccagcctgtaattgagtattatacgctcagatattcttcagccagacatttcttttgctggctatcaacacgtccaattgaggaatactgtctgatagcgcgaacggactcaagtccgaataggcaacgaggatgatttacatcataaaagaacacgcttttcgcgggcttagagcacgtataaattatttgaataacatggtttggccaatcgtttcagcttcccatgagttctatccgtgttgatgataaatcagctggctatcgctgggcgaaaatgccgtttatccaaccggccgctaaccctaatcagcgccaacgctccaatcactatcacaccgccaacccagggggtttgagctaattcccattgggaaacgatctgtccaccgataagcgatcccaaggcgatccccacgttaaaagcggcgatattcaaccctgaagcaatatccaccgcatgtggcgtatattcctcggctttctgtaccacatatacctgcaagccaggcacgttgccaaatgcaaagattcccatagccattaaagtaattagagcggcaatgctgtggctcgccgtaaactgaaaaataaacagtagcgcagccaacgcagtgaaaataaagctcagtgccggtaccgcaccgtaccgatctgctaatttaccgccccaaatattcccaatcgcgactgaaactccgtatgccagcaagatccagctcaccgctggcgcagagaaaccggccaattcctgcatcatcggtgccaggaaagtgaacatagtgaaaacgccgccgtaccccagcgcagtaatggcataaatcagtaataaacgcggatgagttaatacctgcaactgctgctttaaaccggcactggctttattgggaatattactgggaatcaaaataacgctggcaacgatcgccactgcaccaatcaatgagacagctaaaaaggtttcacgccagccaaaatgctgcccgataaaggtacctagaggcacgccagtgactaaggctaccgtcaacccaccaaacataattgcaattgcagatgcggctttctctttcggcaccagaccggttgcgatggtagaaccgattgagaagaacacgccgtgagccagcccggtcagcagccgagccactatcaacgattcataacccggagcctgccatgccagcacattgcccagagtaaatagtatcatcagaccaatcagcaaggttttccgaggaatacgccctgttaatgcggtcaatactggtgcgccaattgctacgcccagcgcgtaaatagaaaccagtaaaccagctgatggtaccgaaacatttagctgttcagcaatcgtgggcactagcccaacaatcacaaactcggtggtaccaatagcaaaagcgctaatggtcaatgctagtaaggctaaaggcatcgttgactccagataaaataagtatcgacttgataagccgcattatgagcttctctctggatgacaaaaatgataaaaatatcaaaatatttttgctggattagcaataatgaaagctaactctgatgagctaattacctttgtaaccgtggttgaatgcggcagtttcagccgagctgccgagcagcttgaacaagctaactccgtggtcagcagaaccgttaagaagctagaaaccaaactgggcgtaacattgctgaatcgtactacacgacaaatcagcctaacgcaggaaggcgagcattactttagacgcacgcaggcgattttgcgtgaaatggcattggcggaaaatgaactgctcgataatccgctgaatccaagaggactattgcgcattgatgcctctactccggtaatcttgcatatgctggcaccgctagtggctagtttcagagtgcgctatccgttaatggcactctcattagtttcctcggagacatttatcaatctgatagaacgtaaagtcgatatcgccattcgcgtaggcacattgcaggattcaactctgcgcgccagaaagctgatgaatagttaccgccatattgtggcttctcctgcttatctacagcgctacggcactccacgcactgcggctgaactacagcaacatgtttgtctgggatttaacgatctcccagcgctcaaccgctggccgctattagctcatgatggccagttactggagattaactcggatgtaagttcaaataatggggaaacccagcggcggctttgtcttgaggggaatggtgttgcctgtttgtctgactttatgattcaaaaagatattgatcggggagacttagttccgatattaaaggatctgacgattccagtcgtcatgccaatcaatgcggtttattacagcgatcaggctgtcagtagccggttgcgctgttttattgacttcgtcaccgagcgattagcggaaaatagcaatgaagcaacaacctgacggcaaatatgccgtcagatataacaggctggcattaatcccaatccggagccaaaccttcagggctaaccagacgctcattacgatccaaggcagccatttgtgccatgttttcgtcggtcaattttaattcctgagccaatagattactggctaaattagcttctttggttgaggacggaataaccgaataacctaactgcatcgcccaggccagaataacctgcgccggcgtagcattacgcagtttagccatttgctgaatcactggctcttgcagagctttaccgtaagccagtgtcatatatgaagtaatcgctataccgtgctggcgagcaaacttcaccactttggcgttctgtaataatggagatagttcgatttgattagtagcgatagcttcggctccaacggcatcaatcgcttgctgcatcagatcgatagtaaagtttgaaacgccgatctggcgagtcagacctaattctttagccttcaataactcagccataaactcagcgactggaacttcattctttggtgatggccagtggatcagcgtgagatcgacataatccgttttcagtttttgtaagctttcacgcagagtgggaatcagtttttccgtagacagattggcgatccaaattttggtggtaataaacaactcttcacgcttaacgccactctcagcaatggcttgcccaacagcggcttcattttcatagatttgtgccgtatcaattgcgcgatagcccagtttcaacgcggtggaaactgaatcgataacaacctgatcttgcaggcgaaaagtacccaatccaaatgcagggatgctcattttacttcctcatattttgtctgatcgtcatatctatcattagtcattgtttgcctttcactgcggcgaccgataatcccgctgccgttgaaagatgaactgattatggcctgagttttatcaacaaaaaatgtagtattcagcataatacttttgataaaaaatcaaatataggaaagtaattattgaatctgatagtagcaagccgtacataaaacgttcttaaggcggctcaaaactctttatcaccaaaggccacacctatcaaaagtgatataattctcagttatcccttttaaatgacccatcgcagtaaaaataaacatgattttcggagcacttaagcgacttatttacgcatgtatagtcgttagccaaaagattcaaagcagagaaaacaaccgagctacggcaagcaattgtaagaggtttatgactaagtgattggctataaggtgttgagaatccattaaatgaaatcaaaaagataagaatatagggatagggatagggatagggatagagatagagatagtattgatgattagtatttacccgctctgcttatctgagcgaaaaattctaaagattaaaatgcaaaaaaccctgaatcaaagattcagggttatgcaataagtggcggaacggacggggctcgaacccgcgaccccctgcgtgacaggcaggtattctaaccaactgaactaccgctccaccgattctgttacttatacttccgtatatattcccgttagggccagcatgtccttgctgtttagccaccagatgtcactctgataacttgtgtttgatgcctggcagtgtcctactctcgcatggggagaccccacactaccatcggcgctacggcgtttcacttctgagttcggcatgggatcaggtgggaccaccgcgctattgccgccaggcaaattctgtttcaatcaacccgccacgtgatttacaccacacagccagtcaatccaatctgttaacaatgctgaaaatcaaaacgctctctaaaacaccttcggtgttgtaaggttaagcctcacggatcattagtactggttagctcaatgcatcgctgcacttacacacccagcctatcaacgtcatagtctttaacgttccttcagggggcttaaagccccagggaagactcatcttgaggcaagtttcgcgcttagatgctttcagcgcttatcttttccgcatttagctaccgggcaatgccattggcatgacaacccgaacaccagtgatgcgtccactccggtcctctcgtactaggagcagcccctctcaatcttccaacgcccacggcagatagggaccgaactgtctcacgacgttctaaacccagctcgcgtaccactttaaatggcgaacagccatacccttgggacctacttcagccccaggatgtgatgagccgacatcgaggtgccaaacaccgccgtcgatatgaactcttgggcggtatcagcctgttatccccggagtaccttttatccgttgagcgatggcccttccattcagaaccaccggatcactaagacctactttcgtacctgctcgagccgtcactctcgcagtcaagctagcttatgcctttgcactaacctcacgatgtccgaccgtgattagctaaccttcgtgctcctccgttactctttgggaggagaccgccccagtcaaactacccaccagacactgtcctcaccccagattatggggccgagttagaacatcaaacattaaagggtggtatttcaaggttggctccacgcagactggcgtccacgcttcgatgcctcccacctatcctacacatcaaggctcaatgttcagtgtcaagctatagtaaaggttcacggggtctttccgtcttgccgcgggtacactgcatcttcacagcgagttcaatttcactgagtctcgggtggagacagcctggccatcattacgccattcgtgcaggtcggaacttacccgacaaggaatttcgctaccttaggaccgttatagttacggccgccgtttactggggcttcgatcaagagcttcgccttgcggctgaccccatcaattaaccttccagcaccgggcaggcgtcacaccgtatacgtccactttcgtgtttgcacagtgctgtgtttttattaaacagttgcagccagctggtatctgcgactggcttcagctccgagagcaagtctcttcacctagcgccagcgtgccttctcccgaagttacggcaccattttgcctagttccttcacccgagttctctcaagcgcctgagtattctctacctgaccacctgtgtcggtttggggtacgatttaatgttacctgatgcttagaggcttttcctggaagcttggcatcaactacttctgcaccgtagtgcatcgtcatcacgcctcagggttgatggttttccggatttaccaggaatacccccctacacgcttaaaccgggacaaccgtcgcccggctagcctagccttctccgtccccccttcgcagtaacaccaagtacaggaatattaacctgtttcccatcgactacgcttttcagcctcgccttaggggtcgactcaccctgccccgattaacgttggacaggaacccttggtcttccggcgtgcgggtttttcacccgcattatcgttacttatgtcagcattcgcacttctgatacctccagcagtcctcacagactaccttcaacggcttacagaacgctcccctacccaacaacacctaagtgtcgctgccgcagcttcggtgcatggtttagccccgttacatcttccgcgcaggccgactcgaccagtgagctattacgctttctttaaatgatggctgcttctaagccaacatcctggctgtctatgccttcccacatcgtttcccacttaaccatgactttgggaccttagctggcggtctgggttgtttccctcttcacgacggacgttagcacccgccgtgtgtctcccgtgataacattcttcggtattcggagtttgcatcggtttggtaatccgggatggacccctagccgaaacagtgctctacccccgaagatgagttcacgaggcgctacctaaatagctttcggggagaaccagctatctcccggtttgattggcctttcacccccagccacaagtcatccgctaatttttcaacattagtcggttcggtcctccagttagtgttacccaaccttcaacctgcccatggctagatcaccgggtttcgggtctataccttgcaactagacgcccagttaagactcggtttccctacggctcccctatacggttaaccttgctacaaaatataagtcgctgacccattatacaaaaggtacgcagtcacaccacgaaggtgctcccactgcttgtacgtacacggtttcaggttctatttcactcccctcgccggggttcttttcgcctttccctcacggtactggttcactatcggtcagtcaggagtatttagccttggaggatggtccccccatattcagacaggatgtcacgtgtcccgccctactcatcgagttcacagcatgtgcatttttgtgtacgggactatcaccctgtaccatgcgactttccagacgcttccactaacacacaaactgattcagactctgggctcctccccgttcgctcgccgctactaggggaatctcggttgatttcttttcctcggggtacttagatgtttcagttcccccggttcgcctcgttagactatgtattcatctaacgatagtgcaacgaattgcactgggtttccccattcgggtatcgtcggttgtaacgcttcatatcagcttaccgacgcttttcgcagattagcacgcccttcatcgcctctgactgcctaggcatccaccgtgtacgcttagtcgcttaacctcacaacccgaaggtgtctttcgacatcatcgtgctgcgattattgagagactctacctgcaggtgactccttgtctcggtaaatctacggagagacaagttttagctgcagtgtttcaattttcagcttgttccagattgttaaagagcaatatcttaaacacgactcgttaaagtcatctttaagatattcagttgataatgtctttcactcattatcggatggcgtccccaaggggattcgaacccctgttaccgccgtgaaagggcggtgtcctaggcctctagacgatggggacacaggaaattccgactaaatcaaaaacttaatcgtttctcgtgtcatcatgagtcgaaactcacgacatcaacaggtgctcttgctcattactattatcagacaatctgtgtggacactacgcaatgcgtatcattaggtaaggaggtgatccaaccgcaggttcccctacggttaccttgttacgacttcaccccagtcatgaatcacaaagtggtaagcgccctcccgaaggttaagctacctacttcttttgcaacccactcccatggtgtgacgggcggtgtgtacaaggcccgggaacgtattcaccgtagcattctgatctacgattactagcgattccgacttcatggagtcgagttgcagactccaatccggactacgacagactttatgtggtccgcttgctctcgcgagttcgcttcactttgtatctgccattgtagcacgtgtgtagccctactcgtaagggccatgatgacttgacgtcatccccaccttcctccggtttatcaccggcagtctcccttgagttcccaccatgacgtgctggcaacaaaggataagggttgcgctcgttgcgggacttaacccaacatttcacaacacgagctgacgacagccatgcagcacctgtctcacagttcccgaaggcaccgaagcatctctgctacgttctgtggatgtcaagagtaggtaaggttcttcgcgttgcatcgaattaaaccacatgctccaccgcttgtgcgggcccccgtcaattcatttgagttttaaccttgcggccgtactccccaggcggtcgacttaacgcgttagctccggaagccacgcctcaagggcacaacctccaagtcgacatcgtttacagcgtggactaccagggtatctaatcctgtttgctccccacgctttcgcacctgagcgccagtctttgtccagggggccgccttcgccaccggtattcctccagatctctacgcatttcaccgctacacctggaattctacccccctctacaagactctagcttgccagtttcaaatgcagttcccaagttaagctcggggatttcacatctgacttaacaaaccgcctgcgtgcgctttacgcccagtaattccgattaacgcttgcaccctccgtattaccgcggctgctggcacggagttagccggtgcttcttctgcgagtaacgtcaatcacttcacgtattaggtgaaatgccttcctcctcgctgaaagtgctttacaacccgaaggccttcttcacacacgcggcatggctgcatcaggcttgcgcccattgtgcaatattccccactgctgcctcccgtaggagtctggaccgtgtctcagttccagtgtggctggtcatcctctcagaccagctagggatcgtcgcctaggtgagccattaccccacctactagctaatcccatctgggcacatccgatggcgtgaggccctaaggtcccccactttgctcttgcgaggttatgcggtattagctaccgtttccagtagttatccccctccatcaggcagtttcccagacattactcacccgtccgccgctcgccggcaaagtagcaagctactttccgctgccgctcgacttgcatgtgttaggcctgccgccagcgttcaatctgagccatgatcaaactcttcaatttaagatttgtttgatttgctaccgaagtagcgatgctcaaagattactttctgcaaatatgcattcgaaccgaagttcaaatgtttactgctttggtcactcttcaagacttgatatttcttctgcctgccgaaacaggctttgatatcgccttgcgagtgcccacacagattgtctgataaattgttaaagagcagtgagttagcaacctttcggtgggtaactcgaggtgcgcatattacgctttcctcactcagagtcaactacttatttcgttgaatttctctgttctctttgccggccactcagttacttgattcgctgtgtgccgtctcgatggatgcgcattatagggagttccgcgcaggccgcaactgctaatttcaattaaaatgatcgtttgctgcattccacagcaaaaccccgctttataccttgttgtgcacaaacttatccacagatgcaatctgaactgaaaattgacgagcatcacgcaatcgttttcgctacaattccccgcgtcgaaaatgcgtgtcgatattcataaaatattgtccccgcggatcgattattggcaaaaggatgcaagcggagctgaaattaggtgtgtttttctacttttcacgcaattccactcctttgtacccggcagaaaacccatttcgggacgttatctgaatctgttcctttctatatagatagaagtgcaaggtagagattcacgtaacgctctatttatagcgaatgaaaaactgcgattccaaagccaagggataaaaccatgcaacaacgccgtccaatccgccgtgctctgcttagtgtgtctgataaagcaggtatcattgaattcgccgaagcgctttctcagcgtggcatcgaattgctctccaccggcggcaccgcgcgcctgctagccgacgcaggcctgccggttaccgaagtttctgattacaccggtttcccggaaatgatggatggccgtgttaaaaccctgcatcctaaaattcacggcggtattctcggtcgtcgcgatcaggacgatgccatcatggcagaacatgatattcagccgatcgatatggtcgtagtaaatctgtatccttttgcccaaaccgttgctcgaccggattgctccttagaggacgccgttgagaatatcgatatcggcggcccaaccatggtgcgctccgccgccaagaaccacaaagacgtggccatcgtagtgaagagcagcgactacgcggcaattatcaccgagctggataacaacgacggttccctgacttacccaactcgcttcaaccttgctattaaggcgtttgagcatactgccgcctacgacagcatgatcgccaactactttggctctatggttcctgcctatcacggcgataccgagcagcctgctggccgcttcccacggaccctgaatcttaactatataaagaaacaggatatgcgctacggtgaaaacagccaccagcaggccgccttctatatagaagaggaagtgaaagaagcttccgttgctaccgcagagcaacggcagggcaaagcgctttcttataacaacatagccgacaccgatgccgcgctggaatgcgtgaaagaattcagcgagccagcctgtgtcatcgtcaaacacgcaaatccatgtggcgttgctatcggggattccattctggcagcctacaacaacgcatataaaaccgatccgacttccgcgttcggcggcattatcgcctttaaccgcgaactggatgccgaaaccgctcaggctattatcagccgtcagtttgtcgaagtgattatctccccaagcgttagcgcggatgccctgaaactattagcaaccaagcagaatgtgcgcgttctcacctgcggtcagtggcaaggacgatctgtcggtctggatttcaaacgcgtcaacggcggtttgctggtgcaagatcgtgatttagggatggtgactgaagcggatcttcgcgtagtgtccaaacgtcagccaacggctcaggagctgcgtgacgcattattctgctggaaagttgcgaagttcgttaaatccaatgccattgtctatgctcgcgataacatgaccatcggtataggcgcaggccagatgagccgcgtctactccgccaagatcgccgggatcaaagccgcagacgaaggcttgcaggtggccggttccgccatggcgtccgatgccttcttcccgttccgtgacggtattgacgctgccgccgccgtgggtattacctgtgtgatccaaccgggcggttcgatccgcgacgacgaagtgattgcagcggcagatgaacatggcattgccatgatcttcaccgatatgcgccatttccgtcattaattaacctcacggagttatcccgatgaatattttgattattggtaacggcggtcgcgaacacgctttgggctggaaagccgcgcagtcacctctggcggataaaatctatgtggccccgggtaacgccggtaccgcgctggaaccgcgactggaaaacgttgatatagccgcaacggatatcgccagcctggtcgctttcgctaaaagccacgatatcggtctgaccatcgttggcccggaagctccgctggtgattggcgtggtggatgctttccgggaagcgggtttgactatctttggcccaactcaggctgcggcgcaattggaaggctctaaagccttcaccaaagacttcctagcccgtcatgatattccgacggcgttttaccaaaacttcaccgaaatcgaaccggccttggcctacgttcgtaagataggcgcacctatcgtcatcaaagctgacggtttggccgcgggtaagggcgtgatcgtagcgatgacgctcgaagaagcggaaaccgccgttcacgacatgctggcaggcaacgcttttggcgatgcgggtcatcgtatcgtggtggaagaattcctcgatggcgaagaagccagctttatcgtcatggtcgatggtgaaaacgtattgccgatggcaaccagtcaggatcacaagcgagttggcgatggcgataccggcccgaataccggcggtatgggcgcttattcaccggctccggtagtaaccgatgaaattcaccaacgagtgatggatcagattatctggccaacggtgcgcggtatggcggcggaaggcaatgtgtataccggtttcctctatgctggcctgatgatttctgcagagggtcaacctaaagtgattgagttcaactgccgctttggcgatccggaaactcagccgatcatgctgcggatgcgttctgacttggtcgagctttgtctggctggcgctcaaggcaagctgaatcagaaaacctccgattgggatgaacgaccgtcattaggcgtggtgctggctgcgggcggctaccctgccgaatatcgtcagggagatgtcattcacgggttgccacagcaggaaatcgcaggtgaaaaggtgttccacgctggaacccgcctagctggcaataatgacgtggtgaccaacggtggccgagtgctctgcgtgaccgctttaggcaaagacgtcgcggatgcacagcagcgggcatatcagttggcttcagacattcattgggaaggtagtttctgccggaaagatatcggctatcgcgctatcgctcgcggtaaataatctggtattccagagggcgcaacgcctgcgccctcttcttcagtccaggctacaaacatccatttcgatacaagcatgctaaataacgcggtattaacgctacaaactgccgggctctggctcccaacgacaaaaatcttcatttgctactaacaacaactcttgcccttccggcgcattcaaccaggcgacaccgagtggttgctgcgtattactcgcccgtttagccagccacgcctgcgcatagtcttcaaacttaggccgctgaacgctgccgctacagctcgtcagcacgccattttgcaagcgaccttgaatcagatccacattaccggcacgtagagtggtactcagttccagaatacgtttggcttcaaactgatgaaaagcgatctcatccgccgtcagcagctcgcggcgcgaggccagttggcgctgcataaaactcaccgcaccctgttcatcaaaacgaagttggatggtttctggattttggccgatatcgtttcgccgaatttggcgcagaattccgtgctgatattcatagaaggccacgcgagtgacaccgccctggtaagggctgtaaacgctcataatcacttggggatgttgctgagaatcatcctgacgccagatgcgaactacaccgctatcggcaatgtaaccgctggcactgaactggggggaatcggaatggctgctacaggcgctgagaccaatggcaaaacccaaggtcatcagcacccgccgcataaacaaaaggggctttgccacccctctgcttattattttcactgacacactattatttaacagagtctttcagtgctttgccagaaacgaacgcaggaacgttagctgcagcaattttgatttctttaccggtctgtgggttgcggccagtgcgttcgttacgatgattcactttgaaagtaccgaaaccaaccaattgtacttgctcgccttctttcagagactcggtaatggcagccagagtggactccaaagcagctttagcttgggttttggaaaggtccgctttgtccgcgattacgtcaatcagttgagtcttattcataagttatccttacagtgtgtttatcgtttgcaaagcatcgagtgcgacggatatgccgaatgacagcactctcctgcatacacgcaccgatagccactttttttcgccccccaaatgtagaacagacagggggcagatgtgaagccttaaggcacgacaaatcaggcgttaaatcacgttttcttgccttattgcgttaaatttatgccaatgttactcacagcggcttcccgcaggtcagatcgtaaccctttgatcagatctaaatcgcgttcttcacagtcggccaacaggcggaaaatctcccattggatgtcccattcttcttcaaccgccggtaaaactttcagttcttcgtcggtcatttctttgccagcctgagtcatttccagcatggcaacggtgcgaattgacgtctcgctgatagcaatagcatgttccagagtttcaccgcttaaacgcgagtgaatggcctcacctaatgcaatgcaggcatcaatggctggatacacgccgtaaatggcgtaatcgtcagcggaaggaatcgcttcttcgagcttttccagttggctatcgaagttcactttggcgtcttttaccaccagcgtttcccagatcaaatccagaatacgtcgataaaccgccggatcgccaaattcggtttccaggcaaaatttctggtaattcggatacatacgctcacataagcacgccatgaaagtcagatgttgccagctttccagcttttcgagacgtaaatggattgggttacgtaacatgatcagatctcattcttcattatctgcgcggcagtgtacccgaaattaaatcatatacctatgagagaaaaaccgcctcgctcggtgctaaataagataatttcagaaatgccaatcgtccttcatgttaatctgccaaggtgactaattggtacaaagctaattatttactagaaaataaatatacctacacctgcttcgtcccacttccaatcacgccaacacggtatcaaatcaagccagattcataatcagcgcaagatgaaaaccgcctgatcgatcacagcaaaacatcttcttgctattaagcaggtcaatgccaacggaaccggagtgacccaatgatacgagcattattaaaaaataaatggatatttagtcttctattcttcgctgagacagcgctttctgccgatcttctcgataaggtattacgtgaaactatagtttatcaatctgttattgaggcctcatcggggaaaacattcacaatccggattaatctgtaccaaccggcgggaaatggcccttttccgctggttattctcaatcacggaattgatcctgacggaaaccaaaatgagcgcacgcgctttcacgttgcggctcgcgagtttgtgaaacgcggctacgtggtgatggcgccacagcgtttcggatttggtggttctgaaggaccttttgacattgtgccctgccaacctgatagctacgcttcccgttcgctgcaagaactgaatgccactctaagccatgcccgccagttgccctatgtggataatgagaaaatcattattgccggtcactccgtaggaggacttatcacaatgaaggccggagaacaggagatgcagggcgtgaaaggcctgattaatatggcgggcggttataaatggcctgactgcgactggaaaacacccttgagggcaactatgcagcaggcaggacactcttcccttccctcgttatgggtttatacggaaaatgactcgttattctcaattgagctgggtagggccatgtttgagtcatatcgggagaattggttaaaaactaatggtgctcatgaagtaatgccacgttttgttgcgttaaagccctttgccaatgaaggccatgcttttttccagtggcaggatggagtccagttctggtggcctcccgtggagctatttttgaccgaattgggtttaccaacggcgattgtcacagacatcactgcgcccagccgaaccgaagccagcggtttcgccagtatcaatgacgtcgaaagtgttccttttagcgaacgcaataaagaaagtggacaagaggcttataaacagtttttagatgcaaagtcgccacgggcttttgcattgagtgaagatggcgatagctggggctggtttaatagacaaaataacgtactggaagatgcgctggagctttgtaataacaatacgctaaaagcctgtcggatttacgccaacgacggtgatgtggtttggtaatatttcacgccggactgatatctgacaacgaatccggcgagtttttttaaccttttgtcgctattgccagccaacgctgaaaagcaggtcgattcgacgcgatagcatcagcccaacgtgttggctccggtaaacggtaaccccgcatacagttttgaacccaaaccaatgcgctatccatactgatacggtgccctggcgaaataaacagcggattacagcgcggtttactccgccatacccagcccaatggttcatccccatcaatcaatggttgcaaggtattgttttctaaaggggaaaactgaccgcacaggcgacttttcgccacgccaatggttggtacatccgccagcaggccaaaatggctggctacgcctaatcgacgtggatgcgcaacaccctgcccgtccaccagcactaaatcgggccgatgctgtaactgcgcccaggccgccatcaacgcgggatactcacgaaaagaaagcaaacccggaatatagggcaaggaagtggcaactctggctatttgatattccactaactcaagggagggataacgtagaatggcgatagccgctcgcgttaccgtcccctgttgctcaaaaccgacgtcggcaccggcaatccattgtggcaccctgaagtcaggatcgtcatggaggataatttccgcggctcgctgtcgttgttcctgacgcaatccctgagtatccaccctgtttcctccgcttagacgtggttttatcgatacgtaatattaatttatacgcgatcttggtttaaacatgatattggcgcgacaggttgtgtaccgcttcaacgaatacgcccgcatgctctggcggcacatcctgatggataccgtggcccagattgaacacgtggccttcgccatgcccaaagccagccagaatcgagcttacctcctgctgaatacgtgctgctggcgcatacaacaccgagggatccatattgccttgtagagccactttatcgcccacgcgacgacgtgcttcagcgatatccagagtccaatccaaccctaatgcatcacaaccggttgccgccattgcttccagccactgtccgcctcctttggtgaagagagtgactggcacacgacggccgtcgttctcgcggatcaaaccggcgacaattttgtgcatatattgcagggagaattcgaggtagtcacggccagtcaatacgccgccccaagtatcaaacaccatcaccgactgcgcaccggctttaatttgcgcattcagatacaaaatcacgctatcggccaatttatccagcagcagatgcaacgtagccggttcggcatacatcatttttttcagcttggtaaaggctttgctgctaccaccttcgaccatataggtcgccagcgtccacgggctaccagagaaaccgatcagcggcacttgccctgccagctcgcggcgaatggtgcgtactgcgttcatcacatagcccagttcttgctctgggtccggtattggcagtttttcgacgtcagcacgacaagtaatcggtgattgaaaacgcgggccttcgcccgtttcaaaataaagccccaatcccattgcgtcaggaatggtcagaatatcggagaataggatcgccgcgtccagcggatagcgacgcaaaggctgcaaagtgacttcacaggctaactctgcgttcttacacagcgccataaaatccccggcctgcgcacgggtcgccttgtattctggcaaataacgccccgcctgccgcatcatccatactggggtaacatctacgggctgacgaagtaaggcgcgcagataacgatcgttcttcaactcattcatatggggctcccttaatgatctggcgctattgtagcatgcctgatttagctgtcctgttcggtgcggcacaatgccacggtatcttcgattaaacggcgggctacagtaccgggcggcggcaacagcggcagttgatcgtaacgataccaattggcgttgagcaattcttttggatcgtggcgcaattcgccgctgtcatactccgccataaaagcaatcatcaatgaatgcgggaacggccagggctgcgaggtcacgtagtgtagatttttaatacgaatattgctttcttccatcacttcgcgggcggtcgcctgttccagcgtttcgcccacttcgacaaaacctgctaataccgtatgaatgccgccacgatgacgcacatgctgagccagcaaaatttcttcgccgcgccgaatcgctacgattacgcagggcgcgatttgcggataataacgttcacggcaatggttgcacagacaggcccattcggtgcggctggcatgcatttgatgaccgcagtaaccgcaaaaacggtgagatcggtaaaactccgccaattgcacgccacgaccagccaactggaataaaccgcgatcgacatccagtaactgacgcaccgatcccatttcgctggacatcagttggcgaattaaccaaaccgcctgcccttgccattcgccgatctgtcgggccgtttttccctgtaatgaccaaagtgccgcgctaccgtagggtaattcccctttgggcagccacaatttgttctcatggctaacgatccaccagccatgttcctcacctgtaagttgtagttccatatcgttgttgcacaacctcgacttcactggcaatctagaatctggcttgttacatttttgtaacctaccgttactttttcttactcacggagtcaatcatgctcaaccgactggaaagcctgactcaacgcgttggcggcagtaatgaattaattgatcaatggcttcatgcacgcaaagaactgttagtctcgtattgcaccgtgatcggtattaaaccgctaaaggaaaagcataccccgctcaatcaaaaagcgctggagaacttttgccataatttggtggattacctctcctccggccacttccatatttacgaccgaataatcaaacaggcagaaggtgcctctagcccaaaaatggcgctggcaaccaagttctatccggcgctaaaagataatactcaaactatcatggctttccacgatcgctataccgacaatgagatcgatcaggatagctgcttcgaattccatcaggcattatcggacatcggcgaagcgcttgacgctcgttttactctggaagacaaattgatccaactggccgccgaatcctgggaagccgctcaccctgcggccaccgaagatccgaagaattaacgccattattcgcgcggatctattacgcaaacttgagcttacactgagtcgcgagcatttggatcacagcccaaattcaaaacgacaaataaaatagcttataagacatacttgtagtttttattctctctcctatactgaggcttcttgtcggagtgcctagcgcaggctttttatccaagcaacgcgcaggctgagaccgttaattcgggatccgcggaacctgatcgggttagtacccgcgaagggaacaagagtaatttatcgctatcgcacggctttcacctttaatggatgagctccgtcgcacctggctaacatcgttactcccgccaagctccagacaagcaattttcccaataaaccacactggtaggaatttgctatgtctaataatactcatgcttctccattggctgcatcagccaaacccaaagcccgtccacgcaaagaacaacgtgaagatgcccaacagtttatcaatacgctacaaggcgttagcttccctaattctcaacggatctacctgcaaggctcaagatcggacattcaggtgccgatgcgtgagattcagctcagcccaaccttaatcggcggcggcaaagacgatcctcgctatgaagataacgaagcgattccagtctatgacaccgcgggtccctacggcgatcctcaggccaaactagatgttcacgcaggattaccgaaactgcgcgatagctggatcgccgatcgtcaggataccgaaatgctggagggcgtaagctccggtttcactcagcagcgtttagcggatgaaggtttggatcatttacgtttcgaacatttgccacgccctaaaaaggcgattgcgggcaaatgcgtaacccaactgcactacgccagagcgggtatcgtcacgccggaaatggaatttatcgctattcgggaaaacatgggtcgtgaacgtattcgcggcgaagtgttacgccaccagcacccgggacaagcctttggtgcccatttaccggaaaatattacgccggaatttgttcgtcaggaagtcgccgctggccgcgccattatccccgccaatattaaccatccagaatctgagccgatgattattggccggaatttcctagtaaaagtgaatgccaatatcggtaattccgcagtgacctcctctatcgaagaagaagtggaaaagctggtctggtccacccgctggggcgcggataccgtcatggacttgtccaccggccgctatattcacgaaacccgcgaatggattttgcgtaatagcccggtgccgatcgggactgtacctatctaccaggcgctggaaaaagtgaacggcgtggcggaaaacctgacctgggaaatgtttcgcgacactttgctggaacaagccgagcaaggagtggattacttcaccattcacgcaggcgtactgctgcgttacgtaccaatgaccgccaaacgcctgaccggcatcgtctcccgcggcggttcgatcatggccaaatggtgtctatcccatcatcaggaaaacttcctgtatcagcatttccgcgaaatctgccaaatctgcgccgcttacgacgtttcattatcactgggtgacggcctgcgccccggttctattcaagatgccaatgatgaagcgcaatttgccgaattgcatactttgggcgagttaaccaagatcgcctgggaatacgacgtgcaggtgatgatcgaaggtcccggccacgtaccaatgcaaatgatccgccgcaatatgacagaagaactggaacattgccacgaagcgccattctatacgctggggccgctaaccaccgatatcgcaccgggttacgatcatttcacttccggcattggtgccgctatgatcggctggtttggctgcgccatgctgtgttacgtcacgccgaaagaacatctgggtctgccaaacaaagaagatgttaaacaaggacttattacctacaaaatcgccgctcacgctgcggatctggccaaggggcatcccggtgcacaaattcgcgataacgctatgtccaaagcgcgttttgaattccgttgggaagatcagttcaatctagcgttagatcctgaaaccgcacgcgcttatcacgatgaaaccctgccgcaggagtctggcaaagtggctcacttctgttccatgtgcgggccgaaattctgttcgatgaagatctcccaggaagtgcgcgactacgcggcagcgcaggaggcagaggcccaaaaaatccagatccaaccctcattggaaacccagcaatccggcatggaacaaatgtccgccgaattccgttctcgtggcagcgagttatatcacagcgccagcattcgtcaggtagaggtcaatgatgaacaagcctgacgcaccttttgctactaccgaaaatcggctaggactttatccagtggtggattcactggaatggatcgagcgcatgctggaagctggcgttactacgctgcaactgcgtatcaaagacgcaacggacatgcaggtcgaggatgatattgccgccgcaattgccttaggtaagcgctatcaggctcggctattcatcaacgattactggcagttagccatcaaatacggtgcttacggcgttcatctgggacaggaagatctggaaatcgccgatttaccggccattcaacgcgccggtttacgcctcggcgtgtctactcatgatgagcaagaactggcgctagcgcgggaactgcgcccgtcttatatcgctttgggacacattttcccaaccgaaaccaagcacatgccgtcttctcctcagggagtcgcggcgttaacccgtcaggtcgccaaaacctccgatttccctacggttgccattggtggcatcactatggagcgcgtgccgcaggtagtcgccagcggcgtgggtagcgtagctgtggtcagtgccattactcgtgcggaaaattggcagcacacaaccgcggaattactgcgtttggttgaaggtaaggagacaattcatgccttatgaacagttgaacgatcaggatttcctgcgctatagccgccaattattgttggaagatatcggcccggagggacagcagaagttcaagcagtctagcgtgctgattgtcggtctgggcggccttggctctccggccgcgctgtatttagccgctgcgggagttgggaaactgtggctagccgatgacgatacattggatatcagtaacctacagcggcaggttctttattgcaccaccgatatcggccagagcaaagctcagttagctcagcgtcgtttacagaatcttaatccgcaaattgaaactatcagccttgatagacgtttagccggtagcgatctggctgacgccgttgccgccgctgatctggtgctggattgctgcgataacatggcaacccgccatcaagtcaacgctgcctgcgtacaagctggaaaacccttgattagcggcagcgcagtcggattcagcggccaattactgattatcgaaccgccttacgccaacggctgctacgcctgcctttatcccggaaaagaaacgcagcaaagaaattgtcgcactgctggcgtccttggcccagttgtcggcgtcatcggcaccctgcaagcattagaagcgataaaaatgctggcgggaatgccatcggcgctgagcgggaaactgcgcttatttgatggaaaacagcaaagctggagcactctacgcttaagcaaagcctgtcattgccaaatctgtggagaagcccagtgaaagtctcgatcaatgatgaactcatcgagttggaagctaacctgacggtcaattccatgctaagccaattgggttatgaccagccgggcaccgcgctggctatcaatcaaaccatcattccccgtgataactgggatcaccatttgttactgaatggcgatgacattttgctgtttcaagcgattgccggaggctgatatgttgaaaattgctgataccacttttacctcacgtttatttaccggaacgggaaaatttgccacgccagccttgatgctggacgcattgcgcgcctccgaatcgcagttagtgaccatggcgatgaaacgggtggatctgaaatcaggcaatgacgctattctggctccattgcaacagcttggtattcgtttgctgcctaatacttctggagcaaaaactgcggaagaagcagtgtttgctgcgcgtttggctcgggaagcgctgggtacgcattggatcaaactggaagtacatccagacgtaaaatatctgctgccagatccagtagaaaccctgaaagcggcagagattctggtcaaagatggctttgtggtcatgccttactgcggcgccgatccggtactatgcaaacgtctggaagaagttggctgtgccgccgtgatgccgcttgcttccccgattggctctaatctagggctgttaactcgtgatttcctgcggattattatcgaacaagccaaagtacctgtcgtagtcgacgctggaattggcgcacctagccatgcgttggaagcaatggaattgggtgcagacgcggttctggtcaataccgccatcgccgttgcccaatcgccagtgcgaatggcgcaggcatttaaactggccgtcgaagctggaacgctggctcgtctggccggtttaggccctcgccaacagcaggctagcgccaccagcccgctgaccgctttccttagccaaagtgaggaacgccataatgcctgaagactttcgtcatcgctggcagcagttagattgggatgacatttcactgcgcatcaacagtaaaaccgcccgtgatgtagaacgggcgttaaatagcagcaagccggatcgggaagatctgatggcgttgatttcaccggcggcgttagcttatctggaaccgatggcacagaaagctcaacagcttactcgccaacgcttcggtaataccgttggtttttatgtgccgctgtatctctctaatctgtgcgccaatgattgcacctactgcggtttctcaatgagtaaccggattaagcgtaagacgttggatgaagaggaaattattcgcgagtgcgaagcgattaaagccctgggatttgagcatctattgttggttaccggtgagcatcaaaccaaagtgggaatggactatttcaggcagcatttacccaccattcgcggccgtttcagctcgctgatgatggaggtgcaaccgctggaagaagaagagtacgccgagctgaaaaccttgggtttggacgcggtgatggtgtatcaggaaacttatcacaccgccacctaccaccagcatcatttacgcgggcagaagcaggatttccattggcgactcgccacgccggatcgtttgggtcgcgcggggatcgacaagatcggtttgggcgcactgatcggtttgtctcataactggcgtactgattgctatatgctggctgagcatttgttttatctacaacaaacttactggcaaacccgctattccatctcgtttccacgtttgcgtccatgcgctggcggaattgagccagcgtcactgatgagcgaatcgcagttggtgcaactgatctgtgcttttcgcctgtttgctcctgatgtagaactgtcactctccactagggagtcaccgttctttcgcgatcacgttattccggtggcgattaacagcgtcagcgccggttcgaaaacccagccgggcggttatgccgatgacgaacatccggagttggaacagtttgcaccccatgataatcgctcgccacagcaggtggcacaggctctcattcaaaccggcttacaaccggtctggaaagactgggatcgctatttggggcgttctctctcatcgctcggctctacacccatagattaagtgttgtaagggtgttgaattaaattattgagcgggtaaagcagctccagtgctggcagcactgaagctggctttaactcgattcgaaaagtcacagccacttaaaagttggcattaatcactgtgtctataatttcgccctcttgcgcatcaacacaatcagacacaatgatccccaaataacttttggttctatatttatattcaatagaaaaccacttattaataccatcatagtctgtaaatccgttagctccgataaaaggagtaaccaggtatccacctatacttgtgtaattaatatatatttcatcatctcttttacttttagccaactcgattaagtcattaatgggctttcttttatttattattgataatacggtataatcagaatattcgtcctgcacatgcactttacaataaccattatcgataacaaaagttttattatcttcccatggcatgatattaatcccctgctctccgccttgatatcgacgtaataggattatttttcctcgaatttcctcaatagagggtattctgttctcgataaaaaaataatcaatatatgcaactaagtaactttttaataaaacgtcgttaaatatttcgttgctaccctcctgttttatcgaaagcataataaactctgtcgggttattttttataaataccaagcaactagctaatacatcgctgaggttctgattcagatagacgttactatgatagagtgctaatacatcctcaaccaggcgacatcttatatccaagaaacgaatgccgttattcaattggatatctatatcccatagttgggtctgaatctgtcccgttggtgtcataaaaggaaaaaaaaccgctgagttatttgttccaggaatagatacgttactcagtaacattgaattacctaacttccccatccaattctttctattcataaattacatccttgtatgaagcttgaagtatgattgagcttatccagtcaatttcgtacgtttaatcgatgtcaaaatttgatctcaaaatgatattcatcattgctgcattattggtatcgacaaaatcagagactattattcctaattgacatgttttacatttcctgtattcatcagcaaaccatttattaagtccatgtataaaaacattacccaccgcccctaattttggagtcacagtcacatcacttaaactggtaaagttaatatataatgcattcttttccctaaccctggcacgttttattaatttagccacatattctcttttgttatcaaagtttgaaaaattatagccagagtatttatcttgaatatatatattgtaatttctatttttgatcgtaaaggtgtcattatctttccattgagtagcattaatacctaaatcacctccgtaataacgccgaaaaagaacaattttcccagcaatctccttaacagtcggaattttattttttatgaaaaaaaagtcattatgattttttatatatcgctcagacatgaccttgtgaaatggcatggtactatctttttcggtatattcttttttaactgaaagtataataaattctgtcggattatctgataaaaacttaatacaagtcgctaatatatctccgaaatttaaacctaaataaacgcttccatggtgcagagttaatacattttcaataagacgacacctgatatcgagaaatcttataccatgatctaattgctctcttatattccatcgctgcgtctgaacatatccaaatgaaataggatgatgggtatatgcagcggaatcatgagttccaggaatagagagttcactcagaaaccttgattcatctaccaatccgatccagttattagtagcacctatcataaatttatatccttatataagataaaactcctacgatatatagcaaatactctattacaattaacataattcagaaaaacattctatcgagaataaatgtaagcatgcagacttattatagaaataataaaattaaaaatagaatgtattgaatatttaaggtgtattcagatacgacggtatcatgcctggctgagaaagtaagggggatgacaaatagcatcgtggaaagaaatgaggtcaacatcttgaaaatcggcgtaaaaaaaatccgagaatgaaaacattctcggattttactcagtataagaatcgttcaacggatccttatactgattggcattacccccgaaggagtatttttacgttactggccaacaaagagattagtctttgctgttaccgaaacctgcgttaagcaattcagccaggttggcagttgcttcatccgcgctaacctgcggaacaacaggggtttcgccctgagctttacgacgcatgcgatcctgatgataagcgtaaccggtaccggctggaatcagacgaccaacgattacgttctctttcaggccacgcagttcatcacgtttaccggcaacggccgcttcggtaagaacacgcgtagtttcctggaacgatgctgcagagatgaaggactcggtcgccaaggatgccttggtgatacccagcaggtcacgagtgaacgtggcctcgattttgccttcagctgccaacttacggttagcgattttaacgcgagacatttctgcctgctcgccttccaggaagtcggtgccacctgcatcaacgatggtgcctttacgcagcatctgacgaacgataacttcgatgtgtttatcgttaatcttaacgccttgcagacggtaaacttcctgcacttcgttggtgatgtaacgggtcacggcgtgaacgccacgcagacgcagaatgtcgtgtggagattctgggccgtcggaaaccacgtcaccgcgttctacaacttcaccttcgaacacgttgagctgacgccacttaggaatcatctcttcgtatgcatcgctaccatccaacggtgaaatcaccagacgacgcttgcctttggtctctttaccgaacgagatgatcccgctgatttcagccaggattgcaggctctttcggacgacgtgcttcgaacaagtcagcaacacgtggcagaccaccggtaatatccttggtaccgctggattcctgcggaatacgcgccaaagtatcaccagcaccgatctgaataccgtcttccagctgaacaatcgctttacctggcaggaagtattgagcaggcatatcagtacctgggatcaatacatcgtcgcctttagcgtcaacgattttcagtgctggacgcaggtctttaccgctaccggtacgctctgcggagtccagaacgaccagagaagacaaaccggtcagttcgtcggtctggcgggtaatggtctggccgtcaatcatatccgcgaagcgaatgaaaccgctcacttcggtcacaactggcatgatgtgcggatcccagttggcaacggtctccccgccctggacttctgcgccatcgcctttgcccattacggcaccgtaaggcactttgtagctttctttagtacgaccgaattcgtcgatcagcttcagctcggtattacgagaagtaataaccagcttacctgctgcattcataacgaacttggcgttgctcagtttcagcgtacctttgttcttaacctgaatgctggattctgctgccgcacgagatgccgcaccaccgatgtggaacgtacgcatcgtaagctgggtacccggctcaccgatggactgtgctgcaataacacccactgcttcacctttgttgatgatgtggccacgcgccaggtcacgaccatagcagtttgcacacacaccgaaatcggtttcacagcttacaactgaacgaactttaacgctgtcgacggagttttcttctaacagatcacaccatttttcgtccaacagggtgttacgcggaaccagaatatcagccgtacccggcttcaagacttcttctgcagtcacacggcctagaacgcgatcgcgcagtggctctttaacatcaccaccttcgataaccggagtcatcacgataccgttatgggtaccacaatcgtcttcggttacaaccagatcctgtgccacgtcaactaaacgacgggtcaggtaaccggagttcgcagttttcaatgcggtatccgccaaacctttacgcgcaccgtgggttgagatgaagtactgaagtacgttcaaaccttcacggaagttcgcggtgattggcgtttcaatgatcgaaccatctggcttagccatcaggccacgcataccggccagctgacgaatctgtgctgcggaaccacgcgcaccggagtcggccatcataaagatgctgttgaaggaaacttgttgctccacttcacctttactgttgatgacgtcttccacggacaagttgtccatcatagccttggcaacacgttcgttggctgcggcccagatatcgatcactttgttataacgttcgcccgcggttaccagaccagattggaactgctcctgaatctcggcaacttcggtttcagcttcttcgatgatcccagctttcgcttcagggataaccatgtcatcgatacctacagaggcgcctgaacgcgctgcgtaagcaaaaccggtgtacatgatctggtcagcaaagataaccgttggcttcaagcctaggatgcggtaacaggtgttcagcatcttggagatagcttttttgcccagcggctggttaacgatagagtaaggcaggcctttcgggacaatcatccacaaaatggcacgaccgatagtcgtatcgatgatgctggtttgcgaaacggtttcaccttccgcagtacggatttcttcagaaatacgcactttaactcgggcgtgcagagacgccaggccagcgcgataaacacgctcagcttctttcgagccattcagcaccatgccttcgcctttggcgttaacacagtcacgggtcatgtagtacagacccaatacaacgtcctgagaaggaacgatgattggctcgccgttcgcaggtgacaggatgttgttggtagacatcatcaacgcacgcgcttccagctgagcttccagcgtcaagggtacgtgaactgccatctggtcaccatcgaagtcggcgttataagccgcacaaaccagcggatgcagctgaattgctttaccttcgatcagaaccggttcaaacgcctggatacccaaacggtgaagggtgggtgcacggttcagcagcactgggtgttcgcggataacttcatccagaatatcccaaacaaccgcttcttcacgctcaaccatcttcttggcagctttgatggtggtagcaagaccacgcagttccagcttaccgtagatgaacggtttgaacagctcgagtgccattttcttcggcagaccgcactgatgcagacgcaggtatggacctacggtgataaccgaacggcctgagtagtcaacacgtttacccagcaagttctgacggaaacgaccttgcttacctttgatcatgtctgccaaagatttcaacggacgcttgttcgagccggtaattgcacgaccgcgacggccgttatccagcaatgcgtctactgcttcttgcagcatacgcttttcgttacgcacgatgatgtcaggagcagccagatccagcaggcgtttcagacggttgttacggttgatcacgcgacgatacaaatcgttcagatcggaagtcgcaaagcgaccgccatccaaaggaaccaatggacgcagatctggcggcaacacaggcagcacggtcaggatcatccactctggcttgttgccagactgtacgaacgcttccagcagcttgatacgcttggtcagcttcttacgcttggtctcagaattcgtttcgttcagttcttcgcgcaggatttcgcattcggcttccagatccatgtttttcaacaaggcctggatcgcttctgcacccattttcgcgtcaaactcatcaccaaactcttccaacgcgtccagatactgctcttcagtcaggatctgacgacgttccaggttggtcatgccgccttcgataaccacataggattcgaagtacagaacacgttcgatgtcacgcagtggcatatccagcaacaaaccgatgcgcgaaggcaaggatttcaggaaccagatgtgtgcagtcggagaagccagctcgatgtgacccatacgctcacggcgtactttggtctgagtcacttcaacgccgcatttctcacagattacaccgcggtgtttcaaacgcttgtatttaccacacaagcattcgtaatcttttactgggccaaagatacgggcgcagaaaaggccgtcacgttctggtttgaacgtacggtagttaatggtttccggctttttaacttcgccgaacgaccaggaacggatcatgtctggcgaggccagagcaattttgatcgcatcaaactcttcggtcttagtttgcgctttcagaaactttaataagtctttcacggattggctcctgtcggagttagacctgataggcgcccaaacctaggtttgagcgcccctgtgaccagtgcgtaccaccagcagactcccggctgtgagagcctgccgtctggagaagatttactcttcttccagctcgatattgatgcccagcgagcggatttctttcaacaatacgttgaaggattccggcatgcctggttccatacggtgatcgccatccacgatgtttttatacatcttggtacggccgtttacatcgtcggacttgacggtaagcatttcctgcaaggtgtacgcggcgccataagcttccaacgcccacacttccatctcaccgaagcgctgaccaccgaactgagctttaccacccagcggctgctgagtaaccaagctgtaagaaccggtagaacgcgcatgcattttgtcatcaaccaagtggttcagtttcagcatgtacatgtagccgacagtaacctggcgctcgaactgctcaccggtacggccgtcaaacaaggtaatctgaccagaagttggcaggccacccagctttaacagttccttgatttcagtctctttcgcaccatcgaagactggtgttgcgattggcataccttttttcaggttctcagccagacgcataacttcgtcatcggtaaaggtgttcaaatcaactttctgacaaacgttgtcgcccagatcgtatgctttctggatgaactcacgcagtttggcaacgtcttcctgcttcttcagcatggcgttgatcttctcgccgatacctttagctgccatccccaagtgggtttccagaatctgaccgatgttcatacgcgaaggtacgcccagcgggttcagaacgatgtctaccggcgtaccgttttcatcgtaaggcatatcttcgatcgggttgatcttggagataacacctttgttaccgtgacgacctgccatcttgtcacccggttgaatctgacgtttaacggccagatacactttaacgattttcagcacgcccggtgccagatcatcgccttgggtgattttacgacgcttggcatccatcttcttctcgaattcggatttcatttcgtcgtactgctctgccagctgttccagctggttttgcttgtcttcgtcggtcaggcccagttccaaccagcggtcacgtggcagtttgctcagcttgtcagcttcgataccaccagaaaccagcacggcgtggatacgtgcaaacaggccagcttccagaatctgcaattcttcagtcaggtctttcttagcctgcttcagctgcatttcttcgatttccaacgcgcgcttgtctttttctacgccatcgcgagtaaagacttgcacgtcgataaccgtaccggaaacgccgtttggtacacgcagagaagagtctttaacatcagacgctttctcaccgaagatcgcacgtaacagcttctcttctggagtcagctgggtttcacctttaggtgttaccttaccaaccagaatgtcgccgccggtgacttcagcaccgatatacacgataccggattcatccagtttggagagcgcagcttcacccacgttagggatgtcggcagtgatctcttcaggccccagcttggtgtcacgagacacacatgccaattcctgaatatggatagtggtgaagcgatcttcttgaaccacacgctcggagaccaagatggagtcttcgaagttgtaaccgttccaaggcatgaaggctacgcgcatgttctgacccagcgccagctcacccaggtctgttgatgggccatctgccagcacgtcgccgcgctcgattggctcaccgagattcacacacggcatctggttgatacaggtgttctggttggaacgggtgtacttagtcaggttataaatatcaatacctgcttcgcctgggtacatctcgtcttcgttaactttaatgacgatacgggatgcatctacgtactgaacggtaccgccacgtttggctacggaggttaccccggagtcaaccgctacagcacgttccataccggtaccaaccagcggcttatcagcacgcagagtaggaaccgcctgacgttgcatgttcgcacccatcaaggcgcggttggcgtcatcgtgttctaggaatggaatcagagaagcaccaacggacaccacctgctgagtggaaacgtccatatagtcaacctgatcgcggctaaacaggctggattcgcctttgctacgacaagtgactaagtcttcgatgaagcggccgtcttcgtccaggttggagttcgcctgagcgataacgaagttgccttcttcaatagcagacagatagttgatttcatcagtcaccacaccgtcacgcacgcgacgatacggagtttccaggaaaccatactcattggtctgtgcgtacacggacaaggagttgatcagaccgatgtttggaccttctggcgtttcgattggacatacacgaccgtagtgagtcggatgaacgtctcgaacttcaaagccagcacgctcacgggtcaaaccgcccgggcccaatgcagaaatacgacgcttatgcgtgatttcagacaacgggttgttctggtccataaattgggacagctggctggaaccgaagaactctttcaccgccgccgaaataggcttggcgttgatcatgtcctgaggcatcagcgtgtcgaggtcgccaagagacaaacgctctttaacagcacgctcaacgcgaaccagacctacacggaactggttttcagccatttcaccaacggaacgaatacgacggttgcctaagtggtcgatatcatccacttcgcctttaccgttacggatatcgatgagcttcttcatcacttcagtgatgtcttctttgctcaggataccggaaccttcgatctcgtcacgcagcagtgaacggttgaacttcatccggccaaccgcagacagatcgtagcggtcttcagagaagaacaggttctcaaacagattttcagctgcttcgcgagttggtggctcaccaggacgcatcatgcgatagatctcaaccagagcgcttaagcgatcgctggttgggtcaacgcgcagggtctcggagatataagcaccgtgatccaggtcattggtgaacagagtttcaatgcgtttgtgaccagcctggctcagtttcgccagcagatccagtgacagctccatgttggctgcacagatcagttcgccagtgttctcatcgatatagtctttagcgaccactttaccggcaatgtattcaaccggaacttcgatgcgatccacaccgtctttttcaagctgacggatatgacgagcggtaatacggcgagctttctcgacataaaccttgccattagcttcgatgtcaaaggaagctgtttcaccgcgcagacgctctggaaccagctccatctgcagcttgttatcacgaatttcgaacacaactttatcaaagaacaggtcaaggatctgttcagtggtaaagttcaatgcacgcagaatgatggtcgcaggtaatttacggcgacggtcaatacgcacaaagaggttatctttcgggtcaaactcgaaatctaaccatgaaccgcgataagggataatacgtgcgttatacagcactttacccgatgaatgggttttacccttatcactgtcaaagaatacaccaggactacggtgaagctgagatacgataaccctctcagtaccgttaatcacaaaggtaccattctcggtcatgagtggaatttcacccatgtagacttcttgttccttgatgtctttaaccgtaccttcaggagcttcccgctcatagataaccagacgcagcttaacgcgcagcggtgctgaatacgtcacgccacggatctggcactctttgacgtcaaacactggctcaccaagacggtagctaacgtattgcagctccgaattgccactgtagctctggattggaaaaacagaacggaatgccgcttctaggccgtgctgtccttctggatcttgctcgataaatttctggaacgagtcaagttggatagaaaggagataaggtatgtccaaaacttgtggacgtttaccaaaatccttacgaatacgttttttctcggtataggagtaaaccatagggttcctcagctcgctgatcagtgacccactctgtccgtcctaaaggacagttcattcaacactattttctcgatcggaaagtcgaaacactttccgtaatacctcgttctatcactcttaaaccatttcatcgcgttaccttgactaccgagctacccgagtgggtcgtagctgagaacgcagtatattaagtcgtcgatagaaagaaatattggggttagtcagtatctaaacagtgtgaaactccactgacgccctacagcgcaaaaaggctggtgactaaaagtcaccagccatcagcctataacttaggctgcacagttgaaattaaatttatttaatttcaacttctgcaccagcttcttccagtgcttttttcagtgcttcagcgtcgtctttgctcacgccttctttcagagcagctggcgctgactcagtcagatctttagcttctttcaagcccaggccagttgcgccacgtacagctttgattaccgcaactttgttagcgccgattgctttcaagataacgtcgaattcagttttctcttctacaacttcagcagcagcagcaggacctgcagcaacagcagcagctgaaacgccgaatttctcttccatagcggagatcagttcaacgatttccattacagacagagctgcaacgccttccagaatttggtctttagtgatagttgacataacaagtgttcctaaaatacagaaatagtttatacgttaaaaagcagtgtcggaaaaaacagagggcgattaagccgcttcagcttctttctgatcacgcagcgcagccaaagtgcgaaccaatttgccagcagcggcttctttcatggttcccatcagacgtgcgattgcttcttcgtaggtcggcagagttgccaggcggtcgatttgagccgcagggattaactcgccttcaaaggctgctgctttaacctcgaattttgcattcgctttcgcgaaatctttgaacaaacgagcagctgcgcccgggtgttcactagaaaatgcaatcaaggttggaccaacaaacgtgtctttcaggcactcgaatggagtaccttcaactgcgcgtgacagcaaggtgttacgaacaacttgcatgtgaacgccagcttcacgacctgctttacgcagttcagtcattttatcaacggttacgccacgggaatccgcaacaaccgcagacagcgcacctttggctacttctttaacttcagcaacaatcgcttgtttgccttgaagatttagtgccattagttcttgctcctggattaaccggagaataattccccggaactcacatcacccaattacgacaacaatgtcattaacgggcgttgaaacacggtgagcagaatccagcaaagacaattctttaattaaaaagaaaaaatttctttaggctctgtcaccgtctacgcaggaaattaagtcctttgcagaacacctgcggtcttggacggaggcttggataggccaagctccaaccgaaaaattctgttgttcacatggtacggttaaaccgtagtcaatagaaccatgggcgtaagattctagacaaacctaacgcccacgtaaagcgataaaagcaaatagtgattagttcactactgcagtcaggccgctttgatcaatagcaacgccggcgcccatggtggtggacaggctgattttcttgatgtaaacgcctttcgctgtagcaggcttagccttcttcagcgcaactaccagggattccaagttttctttcagcttgtcagcgtcaaagtcaactttaccgatggtagtgtggataataccgtttttgtcgttgcgataacgaacctgacctgctttagcattcttaactgcttcagcaacgttaggagtaacggtacccactttcgggtttggcatcaggccacgtgggcccaagatttggcccaattgaccaacaacgcgcattgcatctggagatgcgattacgacgtcgaagttcatttcgcctttcttgatttgatcagccaggtcgtccatacctaccagctcagcaccagcttcttttgctgcttcggcgttggcgccttgagcaaatacagcgacgcgaacagaacggccggtaccgtgtggcaatacagttgcgccacggacgttttgatcagatttacgagcgtcgataccgaggttaacggcaacgtcaacgctttctacgaatttagcagtagccagctctttcagcagggcaacagcttcgttgatatcgtattgcttagtcacatcaactttgtcacggatcacgcgcatgcgcttggtcagcttagccatttattaaccctccactaccaggcccatggaacgagcagtaccttcgatagaacgcatcatagcgtctacgtcagcaccagtcatatccgcagctttggtttctgcgatttcacggacctgagcaacggtcactttacctactttgtctttgttcggcttgccggaaccagacttaatacctgccgcttttttcagcagaactgctgctggcggggttttagtaacgaaagtgaaagagcgatcagaataaacagtaataacaacagggatcggcaggcctttctcaatgctttcagtcttagcattgaacgctttacagaattccatgatgttaacaccctgctgacccagtgctgggccaaccggaggacttgggttcgccataccagctgctacttgcagcttgacataggcttgtactttcttagccatttacgatttcctcgatttgggtagtatcgcctcgttgtgaggctccccgtgttttgcctcgcaaagtcggaagactgagccagacatctaaaaacaaaaggcgcgaaattatagtgtaatttcacgcctgatacaagactcaaagttcaaccggtggtgaaaattgaatcagcctttctcgacctggctgaagtccagctcgaccggtgttgcacggccaaagatggaaacagacactttcaagcggctcttttcgtagtccacttcttcaacaacgccgttgaagtctgcgaacggaccatcgctaacgcggaccagttcacctggttcgaacagtgttttaggacgtggtttatcacccacttgttgaagacgattcattatcgcatcaacttctttatcactgatcggcgcagggcgatcggaagtaccaccgataaagcccatcacacgcggtacgctacgcactaagtgccagcttgcgtcattcatgaccatctggaccagaacgtagcctgggaagaacttgcgttcactcttacgacgcaggccgccacgaatttccacgacttcttccgtcggaaccatgacttcgccgaatagctcttccatgccctgtaatttgatatgctcacgcagcgattgagctacgcggccttcaaaaccggaaaacgcctgaacgacgtaccaacgcttttttggtgcttcagacatcttagaacctcaggccagtaataaacgatactaagcgaaccaggataccatccagtccccacaaaatcagtgacatcacggcagtaaccgcggcaacgattaacgtggtgtgtagcgtttcctggcgagtaggccaaatcactttacgcacttccgtgcgtgcttcgcgagcaaacgctactgtggctttgcctttaaccgtcatcagcgcaacagcaccggcaacagcgataattacaacaactgccagcgcgcgcagtggaagactgaaatctcggtaataataattgccaacaattgccgcaaccaataagacggcaacaactagccatttaaccgcttccaggccgcgcccgctcccttgagcctcggtattcgcactcataaaccaacctgtcactatgattcagaacaaacaactttgcctcgcgtagcgaagcaaaccaaaccgaaagatgctctagatttccggcaccattcagcactatccgccgtactgacagagcccatctcaccaataattatgagtctaaaaccactgatgagataggttctggtgtcacaacgtagaaaaagggcatcaaatgatgcccttttaccgcatgtcgcgtcaaatcttattcaataactttagcgacaacgccagcacctacagtacgaccaccttcacggattgcgaaacgcaggccgtcgtccatagcgattggcgcaatcaggtttacaatcatttgaatgttatcacctggcattaccatttccacgccttctggcagttcaatggtaccggtcacgtcagtagtacggaagtagaactgaggacggtaacctttgaagaatggcgtatgacgcccaccttcatctttgctcagaatataaacttctgattcaaacttggtgtgtggcttgatagaacctggcttagccagaacctgcccacgctgtacgtcatcacgtttagtaccacgcagcagaacgccaacgttttcaccggcacggccttcgtccagcagcttgcggaacatttcaacgccggtgcacgtggttttgatggtatcgatgataccaacgatctcaacttcttcacccactctgacgataccgcgctcaacacgaccggtaacaacggtaccacggccagaaatagagaacacatcttcaattggcagcaggaacggcttatcaattgcacgctcaggctgtggaatgtagctgtccagtgcttcagccagttcaataattttggcttcccactctggttcgccttccaacgctctcagcgcggaaccacgaataaccggagtgtcatcgcctgggaaatcgtattgagacagaagctcacgcacttccatctcaaccaattccagcaattcttcatcatcaaccatgtcacatttgttcaggaagacgagaatgtaaggaacgcccacctgacgacccagcaggatgtgctcgcgagtttgtggcattgggccatcggtcgcagcaacaaccagaatcgcaccgtccatctgagcagcaccggtgatcatgtttttcacatagtcagcatggcctgggcaatcaacgtgcgcataatggcgagacggggtgtcatattcaacgtgcgaagtattgatggtgatgccacgcgccttttcttctggcgcgttatcgatctggtcaaacgcacgggcattaccaccgtaagttttggccagtacgctggtgattgcagcagtcagggtagttttaccgtggtcaacgtggccgatagtacccacgtttacgtgcggttttgtacgttcaaacttttctttagacatcgattgtccctctaagacacggaatcggtggtttcaccacatcaaccaagcaaaatgcttgctgaatccatagcgcagaaagaagatcaagggagcgagagaaagaagaagtggtgctgataggcagattcgaactgccgacctcacccttaccaagggtgcgctctaccaactgagctatatcagcacatcttggagcgggcagcgggaatcgaacccgcatcatcagcttggaaggctgaggtaatagccattatacgatgcccgcatcctggaactcggctacctgacttatctgcagaatctaaaaggaagggcgtggcctcttcactcttggaaggttttcaccttccctttacttgccaggcaggttttcattttcctgaatcaccttggcacataaagttgaatatggtggtggaataaggattattcatcacttcgttcctcacccttcgggccgccgctttgcgttgttgtcttgcttcgctcggctcgaactttgtcgaaggttttcaccttcccctcaagcgcttatctcgattcattacttcgaatcacctaaggctcaaggttaaatatggtggtgggggaaggattcgaaccttcgaagtcgatgacggcagatttacagtctgctccctttggccgctcgggaaccccacctaattgtaagtacttgaatggtgccggcaccaagagtcgaactcgggacctactgattacaagtcagttgctctaccaactgagctatgccggcatcaagtgcagcgcattctaggtagaccagacttgcgatgcaacaaaaaaatcgcttaattcgctctatcgctcataaaataaacagatttgcgcgctgtgacgtattatccagcaatgtacgttcaaatattattcgtaacggcttaacttgtcacccttgaattgccgattttaaaaacagatcacaacggaccattcgcaccaatttgtgtcacgcagcctcattcaagtgcatacaaagtatcagattaaaataaatacccataagccgcggtaagttcgcattggcgtaattcttgctttctcagcatcaatacattggttttttctgtttatcgtccaatgcttacttaccaatgaggtatacccaatgaaaatcgttttgttaaacgcagcgactctacctatttatcgcaatgaattggcgcttctattgattgatgcggtcacccatggcgcatctattggttatagctctcaacatttaccagctgaagaagcagaacagtattttcatagcttgcgtcctgccattgccaccagagagttaatgctgtggattgcccgtgatgaatcaggcgttattggcactgtccaactaagtttatgccagaaggacaacggtcttaatcgagcagaagtgcagaagcttttggtacacagtcgctgccggcgagtgggcattggacaaaaattgatgcatgaggttgaagaaacggcataccaacttcaccgcggtttgctttatctagatacgcaaacaggttcatctgctgaatcattttataaagcgcagggataccgttgcataggtgaaatccctgactatgcctgtacaccaagcggtagctaccacccaacgtcgatttattacaagcggctatttgcggcaaatcagtcatatagttcaattgtcggccaaattgcgcatcccagtggggtgaaaaatatccacggtgccataaacagtcttaattgatcggaataccaacatacgtcaaagaaatcgctcgccacgaacaaaaaactctacgccaaaaaccaagctgcctataatatgcagcttgtttcttatctggagttggcgtccagcgcctttcccaacctgcgtttacaggcagaatttggcttatgacaaaaagagagcaatctttagcgacgccttacctacagttcgatcgcacacagtgggcggccctacgcgactcagtgcctttgacgctgacagaagaagaaatcgttaatcttaaagggataaacgaagacctctcattggaagaagtggcacagatctacctacccttgtcccgtctcctcaatttctatatcagttctaatttgcgtcgtcaggcggtattagagcagtttttaggaaccgatgggcaacgtattccttatattattggtatcgcaggtagcgttgccgtcggcaaaagcacaacggcgcgtctgttgcaggcattgctaagccgttggccagagcatcgcagcgttgaactgatcaccactgatggtttccttcacccaaataaagtattaaatgaacgcgggttaatgaagaagaaaggtttcccgcaatcttatgatatgcataatttggtgaaattcgtttccgaggttaagtctggagccagcgaggttacagctcccgtctattctcatctgatttatgatgttgtccctgatggaaataaaactattaagcaacctgacattcttattttagaaggtctgaatgtgttgcagagcggcatggattatccacacgatcctcatcatgtatttgtttctgacttcgtcgatttctcaatatatgtcgatgcgccagaggaattactgcaaaactggtatataaaccgttttcttaaattccgacaaggtgcattctctaaccctaattcttatttccataactatgcacagttgcctgaaaccgaggctatcaagattgccactcagctttggaaagagattaacggactgaatttaaagcaaaatatactaccaacgcgtgagcgcgccagtttaataatgactaaaagcgctaaccacgcagtagaaagcgtccggttgagaaaataaatttaatagggaggctaagtctccctatttattatggattaactccgcgaagagatatttctccaccgatgtaaggcttcacatcaccgtcttgttccagcaataaaccgccttgctgatctattcctctggcaatgccgaatatctcttggttaccgataatcaatttaactggccggtctaaataattatccaactctcgccaacgagaaataaatgcccctaaaccttcattttcgaacttaataaccgcgcgacgtaattcactcaataactcagcggtgagtttattgcgatcgatagaaacgccggcctcttgtaaattaatccaatcctggctaataacgttattcgatgattctcgcatcgataaattaattccggcgccaataactaactgggcagcgtccccggtttttcctgttaactcaactaatataccggctaattttttatcgtttaagtataagtcgttgggccatttgaccttcacatccgccgcacctagctttctcaatacttcggccatcacaatgccgactaccagacttaaccccattgcggcagcgggtccctgctctaggcgccaaaacatggagagataaaggttagccccaaatggtgaaacccaatgacgcccacgtcgccctcttccggcctgctgatattcggccacacaggcatcgcctgactggagttcattaattcgatcaagaagatattggtttgtcgaatcaacgaccggcaaaacactgactttcccttcgggtaaataagtggctatcgcatctgcattcagcaactgaataggttcaggcaggctgtaacctttccccggaacggtaaatacatccaaaccccattcgcgaatggtctgaacatgtttattaattgcggcgcggctcatgcccagagtttcccccagttgctcacccgaatggaatgcgccatcagctaacatgccaatcagtcttaaaggaacggtagtatctttcacgacaagctctccacggcattaacttcgcccgaagccgcaataaaacgcacttcaggttcgagccaaacggcaaatttaagcgcaacctgttggcgtacatggctggcgagatcgacgatatcctggcttgatgcatcatccaggttaataagaaccagagcttgctgctgatgcaccgcagcgccgccaattcggtgtcctttcaatgaacattggtcaatcaaccaaccggcagcaagttttaccgagttatcagcctgaggataatgtggagcagtaggataggttcggagtatttccgcggccttttctgcgctgactataggatttttgaagaaactacctgcattacccgtcacattaggatctggcagtttactccgccgcattgcgcataccgagtcaaaaatctcacgagcagtgaccgtcgacggatttaaacgagttaaatcaccgtaacctagggtaggcttccagtccttattcagcttgatgccgacagcaacaatggcaaagccttcaccatagcgatgcttgaaaatgctatctctatagccaaaagcacagtcttcagccaaaaggcgtcgaacttcgccagtattcaaatcgagcaaatcgacgtattcacagactttttgtagctcgacaccgtaagcaccaatattttgaatcggtgcggagccaacgcatcccggaattaacgccagattttctaaccctgccatttgctgctgtaatgaatagcacacaagttgatgccagttttcacccgcgccaacgtgcagataccatgcggtatcatcttctctacactgaatgcccttaatcctatttaacagtaccgtaccggagaagtcttcaataaacagtacgttacttcctttccctaatagcaacactggctgatttgacgctttagcttcattccaggcagcagttagcgcagaaacagactctacgctcaccacctgggttgcatatgcggaaagagcaaaggtattaaggtttttcaggggcgcggcaggggtcaacatagcttgtaatactcactctaactaaactgtatctagtctaaccgatcggaatactcaggttgtaacttgtttacatcagagggtgaaaaatatatttatttaattaatagcctaatagatagagctgaaaaatggatgcttttcgcccaatttgagttctgcgatctggtagctttgctgattttacatccgaaaatacccattaatgaggatgagtttccgataaaaccgacctggttcgttggttacatggctttttaataaaatataagcccggtgagtgactgtatctgcctgaaaatgctgcgaatttactgcctgaaaacgtcaacggcggcgcaatttaccggataagccgccccttatggaatgaaaatcgccatatacgccttcaacgcccgacattcccgggggttcccatgcccttaaacgcaaaaagccccccgcaatcgcaggaggctcggttcgagggcggcaatgacttttatccgcctcgcgtctgtcttttttccatagcaaaaaccccacgcttttggcatggggtcttggcttgatttgatgcctggcagtgtcctactctcgcatggggagaccccacactaccatcggcgctacggcgtttcacttctgagttcggcatgggatcaggtgggaccaccgcgctattgccgccaggcaaattctgtttcaatcaacccgccacgtgatttacaccacacagccagtcaatccaatctgttaacaatgctgaaaatcaaaacgctctctaaaacaccttcggtgttgtaaggttaagcctcacggatcattagtactggttagctcaatgcatcgctgcacttacacacccagcctatcaacgtcatagtctttaacgttccttcagggggcatgaagccccagggaagactcatcttgaggcaagtttcgcgcttagatgctttcagcgcttatcttttccgcatttagctaccgggcaatgccattggcatgacaacccgaacaccagtgatgcgtccactccggtcctctcgtactaggagcagcccctctcaatcttccaacgcccacggcagatagggaccgaactgtctcacgacgttctaaacccagctcgcgtaccactttaaatggcgaacagccatacccttgggacctacttcagccccaggatgtgatgagccgacatcgaggtgccaaacaccgccgtcgatatgaactcttgggcggtatcagcctgttatccccggagtaccttttatccgttgagcgatggcccttccattcagaaccaccggatcactaagacctactttcgtacctgctcgagccgtcactctcgcagtcaagctagcttatgcctttgcactaacctcacgatgtccgaccgtgattagctaaccttcgtgctcctccgttactctttgggaggagaccgccccagtcaaactacccaccagacactgtcctcaccccagattatggggccgagttagaacatcaaacattaaagggtggtatttcaaggttggctccacgcagactggcgtccacgcttcgatgcctcccacctatcctacacatcaaggctcaatgttcagtgtcaagctatagtaaaggttcacggggtctttccgtcttgccgcgggtacactgcatcttcacagcgagttcaatttcactgagtctcgggtggagacagcctggccatcattacgccattcgtgcaggtcggaacttacccgacaaggaatttcgctaccttaggaccgttatagttacggccgccgtttactggggcttcgatcaagagcttcgccttgcggctgaccccatcaattaaccttccagcaccgggcaggcgtcacaccgtatacgtccactttcgtgtttgcacagtgctgtgtttttattaaacagttgcagccagctggtatctgcgactggcttcagctccgagagcaagtctcttcacctagcgccagcgtgccttctcccgaagttacggcaccattttgcctagttccttcacccgagttctctcaagcgcctgagtattctctacctgaccacctgtgtcggtttggggtacgattcaatgttacctgatgcttagaggcttttcctggaagcttggcatcaactacttctgcaccgtggtgcatcgtcatcacgcctcagggttgatggttttccggatttaccaggaacacccccctacacgcttaaaccgggacaaccgtcgcccggctagcctagccttctccgtccccccttcgcagtaacaccaagtacaggaatattaacctgtttcccatcgactacgcttttcagcctcgccttaggggtcgactcaccctgccccgattaacgttggacaggaacccttggtcttccggcgtgcgggtttttcacccgcattatcgttacttatgtcagcattcgcacttctgatacctccagcagtcctcacagactaccttcaacggcttacagaacgctcccctacccaacaacacctaagtgtcgttgccgcagcttcggtgcatggtttagccccgttacatcttccgcgcaggccgactcgaccagtgagctattacgctttctttaaatgatggctgcttctaagccaacatcctggctgtctatgccttcccacatcgtttcccacttaaccatgactttgggaccttagctggcggtctgggttgtttccctcttcacgacggacgttagcacccgccgtgtgtctcccgtgataacattcttcggtattcggagtttgcatcggtttggtaatccgggatggacccctagccgaaacagtgctctacccccgaagatgagttcacgaggcgctacctaaatagctttcggggagaaccagctatctcccggtttgattggcctttcacccccagccacaagtcatccgctaatttttcaacattagtcggttcggtcctccagttagtgttacccaaccttcaacctgcccatggctagatcaccgggtttcgggtctataccttgcaactagacgcccagttaagactcggtttccctacggctcccctatacggttaaccttgctacaaaatataagtcgctgacccattatacaaaaggtacgcagtcacaccacgaaggtgctcccactgcttgtacgtacacggtttcaggttctatttcactcccctcgccggggttcttttcgcctttccctcacggtactggttcactatcggtcagtcaggagtatttagccttggaggatggtccccccatattcagacaggatgtcacgtgtcccgccctactcatcgagttcacagcatgtgcatttttgtgtacgggactatcaccctgtaccgtgcgactttccagacgcttccactaacacacaaactgattcagactctgggctcctccccgttcgctcgccgctactaggggaatctcggttgatttcttttcctcggggtacttagatgtttcagttcccccggttcgcctcgttagactatgtattcatctaacgatagtgcaacgaattgcactgggtttccccattcgggtatcgtcggttgtaacgcttcatatcagcttaccgacgcttttcgcagattagcacgcccttcatcgcctctgactgcctaggcatccaccgtgtacgcttagtcgcttaacctcacaacccgaaggtgtctttcgacatcatcgtgctgcgattattgagagactctacctgcagatgactccttgtctcggtaaatctacggagagacaagttttagctgcagtgtttcaattttcagcttgttccagattgttaaagagcaatatcttaaacacgactcgttaaagtcatctttaagatattcagttgataatgtctttcactcattatcggatggcgtccccaaggggattcgaacccctgttaccgccgtgaaagggcggtgtcctaggcctctagacgatggggacacaggaaattccgactaaatcaaaaacttaatcgtttctcgtgtcatcatgagtcgaaactcacgacatcaacaggtgctcttgctcattactattatcagacaatctgtgtggacacggcgcaatgcgtatcattaggtaaggaggtgatccaaccgcaggttcccccacggttaccttgttacgacttcaccccagtcatgaatcacaaagtggtaagcgccctcccgaaggttaagctacctacttcttttgcaacccactccccatggtgtgacgggcggtgtgtacaaggcccgggaacgtattcaccgtagcattctgatctacgattactagcgattccgacttcatggagtcgagttgcagactccaatccggactacgacagactttatgtggtccgcttgctctcgcgagttcgcttcactttgtatctgccattgtagcacgtgtgtagccctactcgtaagggccatgatgacttgacgtcatccccaccttcctccggtttatcaccggcagtctcccttgagttcccaccatgacgtgctggcaacaaaggataagggttgcgctcgttgcgggacttaacccaacatttcacaacacgagctgacgacagccatgcagcacctgtctcacagttcccgaaggcaccgaagcatctctgctacgttctgtggatgtcaagagtaggtaaggttcttcgcgttgcatcgaattaaaccacatgctccaccgcttgtgcgggcccccgtcaattcatttgagttttaaccttgcggccgtactccccaggcggtcgacttaacgcgttagctccggaagccacgcctcaagggcacaacctccaagtcgacatcgtttacagcgtggactaccagggtatctaatcctgtttgctccccacgctttcgcacctgagcgtcagtctttgtccagggggccgccttcgccaccggtattcctccagatctctacgcatttcaccgctacacctggaattctacccccctctacaagactctagcttgccagtttcaaatgcagttcccaagttaagctcggggatttcacatctgacttaacaaaccgcctgcgtgcgctttacgcccagtaattccgattaacgcttgcaccctccgtattaccgcggctgctggcacggagttagccggtgcttcttctgcgagtaacgtcaatcacttcacgtattaggtgaaatgccttcctcctcgctgaaagtgctttacaacctgaaggccttcttcacacacgcggtatggctgcatcaggcttgcgcccattgtgcaatattccccactgctgcctcccgtaggagtctggaccgtgtctcagttccagtgtggctggtcatcctctcagaccagctagggatcgtcgcctaggtgagccattacctcacctactagctaatcccatctgggcacatccgatggcgtgaggccctaaggtcccccactttgctcttgcgaggttatgcggtattagctaccgtttccagtagttatccccctccatcaggcagtttcccagacattactcacccgtccgccgctcgccggcaaagtagcaagctactttccgctgccgctcgacttgcatgtgttaggcctgccgccagcgttcaatctgagccatgatcaaactcttcaatttaagatttgtttgatttgctaccgaagtagcgatgctcaaagattactttctgcaaatatgcattcgaaccgaagttcaaatgtttactgctttggtcactcttcaagacttgatatttcttctgcctgccgaaacaggctttgatatcgtcttgcgagtgcccacacagattgtctgataaattgttaaagagcgttcgttacccgttcgcttgtggcgaatcttacggtaacgcgggaggcagataatacgctttcccgctgaagtgtcaagcttttcttttcaactttcgttttaagaaccggcgtttccgcctgcttaacacttcctgacccggcgaagtttgtttcgttgttcccggtcagtggaggcgcattatagggagttcctgacaggctgcaacccctaatttcaaataattttccaaccggcttttttttcaacgaattgcggcgagaatcatcatttttgctattttttatactgcatttgcgagaattcacgggcgaaactgcttacctgctgccaatcggtgtattccacttctttactggtatctgtttctccgccggtcatgcgcataataagttgaatcatgacccgatcaaaccagcgatagcgtggataacgcagcgctccagcgaagacgccgcagagtgtcggctgccaaggcgagcttgccaggaacttacgcacataagaattggtttggggcgtgcgcttctccggtttgcgcgccgtcaggttcacggcaaagaaagcgctcggcatagtattcaattgttccaggtgttgggtgatgaacttcgtcagcactttatcgaagtgcccataacgaatagaagctccgatcatgacctgttggtactgcccgagatcgatattccctactaatgccagatcctgtacgtcacaattgaccatcgcggataattcattagccatataagaagaaatagcctgagtttgcccatcacggctggagtaaagtatcaatgccttcataactactttttcctaattcaaagttactcgcgccagaatgttggcgtaaacagtaccagtagggtgaatacttccaatcgaccaaacaacatggttatcaccagtatccatttagctgcggcattcattgaggtgaagttatctgctaccacccccaagcccggcccaaggttattcagcgtcgcagtgacggcagcaaaagcagaaaactcatccacaccggtagcaatgatcgccaacatactaatgatgaacaccagtgcgtaagcagagaagaatccccagaccgcttccagaatacgttccggtagcgcacgacgccccagtttgatggtgtaaaccgcgttcgggtgaaccaaccgctttaattctcgcgaaccctgcagatacagtaaaaggatacgaatcactttaaggccaccgccggttgaacctgcacaaccgccgataaaagcggaacataatagaaggataggaaggaatagcggccatttggcaatgctatcggtagtaaagcccgcggtcgtggccatagataccacttggaaaaacgcctgattcagagtttccagaccggatttgtacacgctgtgctgccacaaaaccaaagtacaaacgactaccagcgtcagttgtacaaagataaacatccggaattcgggatcgcgccaatacactttcaggctgcgcccgctcagtacggcaaagtgcaggccgaagttacaccccgagatcagcaagaagatggcaatgatagtgttaatcgttgggctggcgaaataaccgatactggcgtcatgagttgagaaaccgccaatagctatagttgagaaactatgcgaaatcgcatcgaacaccgacatccccgccccccacagggaaagcgcgcaggcaatggtgaggagcacataaataagccacagggtttttgccgtttccgcaattcgcggtcgcattttattatctttcaacggccccggcatttctgcccgatacagctgcattcccccgacgcccaatatgggcaaaatcgctacggccaacacgatgattcccattccccccagccattgcagcatttgccgatagaacagaatggccttgggtaaagaatccaacccgaccagcgtagtagcgccggtcgttgtcaggccggaaaacgattcgaaaaaggcatcggtaaccgaaaggttgggtcgctcagaaaaaagaaacggcaaagccccgacgctgcccagcaccgtccagaacagaaccacaatcaaaaagccctcgcgaggcttcagttcatgtttctgtttacggttgggaagccagagaaacaggccaatcaccagggcaacaaagaaggtttgactgaaggcacgaccggcaccatcacgatagatcaacgccaccagtccgggaataaacatagttccggagaataagatgaccagcagaccaacaatacgggttatggcacgaaaatgcattccggcacgttccttagcaattcattggatggggattattgcgaaatgggcgtcaattgcaacgaaccacgactcagatcgcgtaatttctccccgacctgactggcctgagtcgccggtaaagagagacggagattgacctgcgcgccataattaccctgtaaaatctgaccatcaacctgttgtagcagtgattccaccatcgccaactgcgcgtaatcacataacaaagtatattccacctgcggcactttatactttacttcgatttgtttcagcgcttgctgcactccgctgccgtaggctttgaccagcccgccggtgcccagttttatgccgccgtagtagcgaacgaccactgcggttatttcaccgatatgactccccatcagctgtgccagtatgggtttacccgcggttcccgatggctcgccgtcgtccgaaaaccctagctgctgagaatctgtcggtgcgccagcgacaaaagcccagcaatgatgccgggccgttgggtgctcttcttttatctgctgaataaatgctttggcttcattcactccgttggtatgtgccagcagagtgataaaacgacttttcttgatttcttcagtgacgctgacggaagccgccggaataagaaaaggctgcattaagccagattcagatcgcgcgtcatattctcaacccgcttttcatggataacgatattgtcttcaatacggatgccgccataaggtttcatcgcatcaatacgttcccaattaaaatgcttgctgaactcgccgctacgccaaggtgccaatagtgactcaatgaagtagatacccggctcgatggttaataccatgcgcggttcgagaattcgggtgcaacgcagatacggatacttcgacggtgcagccagatggctacctgtatcatcctgcataaaaccagccgaatcatgtacctgtagacctaacggatgacccaagccgtgtggcaggaatgggcaggtcaaaccttgttcgaccatcgcttcttcactgatatccaccactaatttatgggtgcgtaacagtttggccaaacgttgatgcatttgcagatggtaatcggtatagcgcacgccgcttttaatggtgccaatcagcgccagttgttcggcattcagatctttgattaacgccgcaaaatcgcttttgccgttcgccgcataggttcgggtcaaatctgccgcatagccgttgtattccgcgccagcatccatcaaaaaactgcgcatttcggccggtggttgatgctgcaatttggtgtaatgcagcaccgcagcatgctcgttcagcgcaacgatgttgtcataagggacatcggtatcgcgatgaccggtagccatcagataggccagattgatatcaaactcgctcatgccagacagaaaagcttcgtgagcggcgcgatgcccaactaccgcagttttttgcgcttcacgcatacaagcaagttcatagtcggttttatacgaacgatgatagtggaggtaatccaacaccggcttcggattgatattttccatcgagatacccaagccacgagcacgctcctgcgcatagccaatataggcaactcgttgacgctgttgtggtaataaaccagcgatatcatccgctttagttaacgggaatatttcgatggatttggtccagaagctatcaggcaaaggttccacgcagtgccagtaatccaccggtgaatagaaccataattttggcgtattaacaccatcgacccataaccagcagttcggtacttcagtcaccggcacccaagctttaaactgcgcgtttgccttaaacggataatcgcggtcatcaaggaaaatgcgctgcaactccccggaatgaatcagtaaagcatcaagctgattgcgctctaatacttcacgcgtgcgttgctgtagcgtggataaatgttcgttatataaagaagccagcgtttccatcaaagtaccctttgccattagaacttcaggttttttatcttatcacagtcatcggagccgtgttttatctacgcttaaccgtgggattgcccactaaatccttaataatcattacttatagctagattcgcggggaaaaatctcgtggaaattacgtcattatattatcgatgacagcaggatatcgttcaaacttagctgccaatgaaataattaaccagcatataaaacaacaataaatattatatatatcaatgtattcaccaaacctttgtgatccttgctgcaaaaaaacaaactcttatttgcatttatttaacaaaaaaaccacacttcctgaatatctggtcataccagatcacatgcgcttattcaggagatagatatgctctaccaaagcgaaacgctacagctgcactggcttgaaaacggtattgccgagttggtgttcgatgcacctggctctgtcaataaactagataccaaaaccgtggccagtttaggggaagccctaggcgtgctggaaaaacaaactgaactcaaagggttgctgctacgttccaataaagcagcctttattgtcggtgcggatatcaccgaatttctctctctgtttaatgccccgccggaaaaactgcatgaatggctggtttttgccaacaacacctttaaccgactggaagacttgccggttccgacgctgtccgcgatcacaggctatgcgttaggcggtggctgcgagtgcgtgttagccactgattttcgtatcgcttccccagaggctcgcatcggtttgcctgaaaccaaactgggcatcatgcctggctttggaggctccgtgcgtttaccgcgcctgttgggagccgatggcgcattagaaattattgcagcaggtaaagatgttaacgcagccgaagcgttgaaaattgggctggttgatgccgtagtcactcaggaaaaactgattccggccgcattgagcatgttgaatcaggcaattgcaggcaagttagactggcaggccgctcgtcgtcctaagctggaaccgctgaaactgaattcaaccgaagccgccatgtgcttcaccatcgccaaaggcatggtaatgaaagtggcaggcaaacattatccggcgccaattaccgcagtaaagaccattgaagccgcagccaaatttggtcgtgaagaagcgctgaagctggaaaccaacagctttgtgccactggctggttcggatgtagcccgcgcattggtgagtatcttcctcaatgaccaatacgtaaaaggcaaagcgaaaaagctgactaaaggcattactgcgccaaaacaggctgcggtattgggtgcaggaattatgggcggcggcatcgcttatcaatctgcgctaaaaggcgtgccggtcatcatgaaagatatcagcgaaaaatcgctggatctgggaatgaacgaagcagccaagttgctgaataaacaactggaacgcggcaagctagatggtttaaaaatggcgaagacgctcgcaaccattcacccaacgctggattatgccggtattgaacgcgcgcagattatcgttgaggcagtagtcgagaatcctaaagttaaggccgccgttttaagtgaagtggaaggacttatcggagaagagactgtcctcgcttcgaatacctcgaccattcctattaatgaactggctaaatcacttaagcggccggaaaacttctgcggtatgcatttcttcaacccggttcaccggatgccgttggtagaaattatccgtggcgagaagacttcggaaaaaactattgcgaccgtagtggcctatgccacccaaatggggaaaaccccgattgtcgtcaatgattgcccaggtttcttcgttaaccgcgtattgttcccgtatttatacggtttcggcatgctggtacgcgacggcgtagatttccgtcagattgataaagtcatggagaaacagttcggctggccgatgggccctgcttatcttcttgatgtggtagggattgatactgctcatcatgctcaagccgttatggcgctcggtttccctgaacgcatgggcaaagattaccgcgatgccatcgatgtactgtttgaaaaccagcgttacggtcagaaaaacggtattggtttctatcgctacacgcaggatgccaaaggcaaaccgcgtaaagaaaacgatgatgctatcgacgggttgctggctccggtcagccagccacgccacactctcagcgacgaagagatcatcgcccgagcgatgatcccaatgattaacgaagtggtgcgttgcctggaagaaggcattattgccagcccggccgaaggggatatggcgctggtgtacggccttggtttccctccgttccacggcggcgtgttccgctatctggacactctgggcaccactaaatatgtggaaatggcgcagcgttatgccgatttgggtgcgctttaccacgtacccgccgggctgagagccaaagccgagcgtaacgaaacctattatcccgtagcggcaacgctgcctgatatctccactgaccaaccggcatgaggtctgaaaaaatggaaaacgtagtcattattgacgccgtccgtactccgatgggtcgctccaagggcggcgcattccgtaacgtacgcgccgaagatctttctgcccatttgatgcgcgcagtgttaagccgcaacccagcgctgaatgccggtgaaatcgacgacatttattggggatgtgtgcaacaaacgctggagcaaggcttcaacatcgctcgtaacgcttctttactggcagaaattccacacaatgtggccgcagttaccgttaaccgtctgtgtggttcatccatgcaggctctccatgacggcgcgcgcgctattatggtcggtgatgcgcaaatctgtctgattggcggcgtggaacatatgggtcacgttccaatgaatcacggcgttgatttccatccaggaatgggtcgttcagtggctaaagcagccggaatgatgggcttaaccgctgaaatgctggcaaaaattcaccagattagccgtgaagatcaggatcaattcgccgtgcgctctcaccagcgcgctgaggcagcgacgcgctctggcgcattcgccaaagagattgttccaaccaatggccacgatgccgacggcgtattaaaacgttttgattacgatgaagtgattcgtccagaaaccaatctcgccagtctggctggcctacgtccggcgttcgatccggtcaatggtacggtgacagcgggttcttcgtcagcattatcagacggcgcttcagccatgctgattatgagcgaatcacgcgccaaatcgctgggattaaagccacgcgctcgtattcgctccatggccgttgtcggctgcgatccgtccattatgggttacggcccggtgccagccagtcaactggcattgaaacgcgcaggtttacgcattcaggatatcgatttgtttgaactgaacgaagctttcgccgctcaggcactgtcctgcgtgaaggggctgggtctacgggaaagtatggatgacaaagtgaacctgaacggtggcgcaatcgctctgggccatccattgggctgctcgggtgcaagaatttccacaaccttactgaatttgatggaacgtcgcgacgcccagtttggcctagcgactatgtgcattggtttaggccaaggcattgcgaccgtgattgaacgcgtttgattaaaacaaactgtaggacccgttaattcgggtccgtaccaccgctgtacctggagtttagttgccgtattttcccgcctgtcaggggcgggctttttttgttccggcaaaacggtaaccggaacacagcgataaaaccgtcagataaaggcgaacgcatcgccgtaaatatgcgcttcctgcgcaccgcgctctgcacagaaacgttcgcgagctattttggccatttcaaaacggccagcaatgtaaatatcctgctccgccaatgaaccataatcctgcaacactgcacttaataccgtgcccgttctgccacgccattcgtcttctggctgttccaccacgggaatgaccttcaactgagggtatttgatcgagagcgcttccagctcgcttaaatcataaagatgcttggattcacgtccgccccaataaatcgatacttcccgatttggtttttcagccagcgccgccagcagaatggaacgggcataagagaaaccggtgccgcccgcaatcaggatcattggacgctcgctgccttcgcggaaccaagcttcgccgtgtggaatatccacatccaacgttttctctttcagaatgcgatccatcaccgccatcgcatacagatttaactcagatgcgccaatatgcagctcgatataagcctgctctaatggcgttgacgccatagagaatgggcgcttatcacgctcatccatcaccaccatcaggtattgaccagcgcggaaagaaaacgccgattctggtaccagttgcactcggtataccgtatcggtaatggcctctacggaggttactttacagctcaatgtcgtcatgcgttccctctgtcgggtcatcaaatgcaaaactatggacaaaaatcacgcaatcagcgctcaggctctttgtcactgaatatggcaagctcatcccagatcgcatctacacgcgtgcgaacctgctcatccatcttgataggacggccccattcacgaggggtttctgctggccatttgttagtggcatccagccccattttcgatccaagaccggaaaccggcgaggcgaaatccaaataatctattggggtattttcaattaataccgtatcgcgcgctgggtccattcgggtggtaatcgcccaaatcacgtcattccagtctctggcattaatatcatcatcacaaacaataacaaatttggtgtacataaactgtcgtaaaaatgaccacacgcccatcattacgcgcttagcatgacccgcgtattgttttttgattgtgacaaccgctaagcggtaggaacagccttccggtggcaaatagaaatcaacgatttccggaaactgtttttgtaaaataggcacaaaaacttcattcagcgccacgcccatcaccgctggctcatccggcggacggccggtataagtggagtgataaatcgcgtctctacgctgagtgatatgcgtcacggtaaacaccgggaagctgtctatttcgttgtaataaccggtatggtcgccataaggaccttctggcgcaatatgaccctgctcaatatatccttccaaaacgatttctgcacttgcaggaacttcaagatcgttggaaatacatttaaccacttcggttttatgcccgcgtaataaaccggcaaaagcgtattcggataaggtatcgggaacgggagttacggcagccagaatagttgcgggatcggcacccagcgcaaccgaaaccgggaaacgttcaccggggtgcgcctcgcaccattcctgataatccagcgcaccgccacggtgggataaccaacgcataattagctgatttttacctaacacctgttggcgataaataccgagattttgccgttctttatgtggcccacgagtgatcgttaacccccaggaaaccaaaggcgcggcgtcttcaggccagcaatgcatcaccggaatgcggctgagatccacatcatcaccctgccagatttgctcctgacaaggggctgaactcagacgcttggtcggcatattcagcacttgtttgaatttgggtaacttatcgaataaatcgcggaatcccttcggcggatccggttctttcaggaaggctaacagtttaccaacatcgcgcaatgcgctgacatcttcttgccccatgcccatcgcaacccgtttggctgtaccaaacaaattacaaagcaccggcatctcatagcctttagggttctcgaacaacaacgcggggccgccagcacgtaaagtacgatcggcgatttctgtcatttccagataagggtcaatcggctgggttatgcgtttaagctcccccctctgttccagcaacgagaggaagtcgcgtaagtcacggtatttcatgatgatcattatggcggccacaggatgggccattataggctgtctttatagcagttgctgtctttttgttaaaaatgtatacctgctcgctgtaaatgtagaatcgccatcctccaatagtatttttacactagaaatcatggtttgcgagtgggcaaagccatgattctagtcaggtctttatctgtcactgacggcgacttgtagatatcaggtacgcctcagcgcgaacagccaatgtgggatcatcactgacacgaatcccctgcggcagcactgttggaataaatacttttttatcgcattgctgatcggtaactgtctcgataaataaccgccccatatttacctcacgccgttcagccggccaggactgcgtcgggtcaatcaaattatcacctttctgcgctacgatggcgtacaggtcgtattctataggccccttggctaggcgttgccgcaattcctcttgcaagaaatccggcgactttgccttcgcctgctcatcgcttaacccctgccgtccttccaccggctccatacgccagcgaaccgcatactgggactgatctttataagtgataaaggtactcccgccccaatagggaattgtagcgtagctggcagggacgggctgtgatgcaacatactgagcttggcgcaaagtatgaggatgggattggttaaatgtgttcaatcgctctggattgggctttcctgtttcgggatctggcgtcctgacctttaaaaactcgataaattcctgcggggttcgagcaaaaaagaaaggggatgagatcataactaactgccagcgagagtgcttcgtattaaccagctcaaacgccagtccacgcaagtttttggcgttatcggcggccttaggattcccccctccgattgaaaatcgaccgacaacatcagactgctcgtttttacgcaataaatcagcctgtgaaagttcagtcccttcaccgctggcgataaacttacctgaaaaacaaaagcctttagcatgggacgcccgctgtttactgtgtcggccgaatacatcatttagagcgttaaccatctgctcagcggtgatttcttggggaactgcgccggaaacgcttggcaagcaaccaaaagtaattagacatgagagcaaggaaaaactaacttttcgcatcgattttctccaaccatttctatcttagctgtaatgaatcgcgaccatcattactgcatataatttagaaaattctctcatttcaagcgggctatgttatttaactaatcattaaaaatattagtaaaacttacatccattggtgctttcagatgcgcgatacaaactttcctattatccaaacaggagcaaaccaatccgcagcaagacattgcattcaattggaactgctcctggctgaaaaaaaattattggcaatagaatggaacccaatccgctagcggccgagtatcgtgatattcctgcggctcctcgccgtgatggaatactttaaaacccttatctagcacgctgaaatagcttagctcgttgccgctaacgtgcagcagactgccctcgcgtaaagccacgactctctcgcctggattaaccgcgcaaaactcagctaatcgctcatctcgcgtttctcccatatggccactgatatgcgcatcaatataatgtggattaatttgcagcgggaatagccccagcgacggtaaaacaacgctattacgaaccggcatatcattagtggtgcgaatactcggcgtagccacgttacatcctgcgctccaaccgacataaggcacattgcgctcgcgaaccactctctggataggaacgatcagccctttctcatgcagcatctgatttagcatccaggtattgccgccgctgattaaaatgcattccgcttcgccaatagccgctacagggtcggcggcatggtgaatactggttacagttatgcctaaggttttttccagttcctgagcgcgttgatcaaaatcgctgcggatcaatgcataagggataagaactgctgaggtaattttccggctagtgagcatcacccgaatacgatctttggcataaccaagcagttctgcgtcacccgataccttgccgttactcagcaaaaacaactccatgactctctccttttactattcaacaggacatatctacattaactcgaggcgacaattcagttacaccgaggattaataggttagccttacttatatctgatttcatatttcagggttgtgatacctgctgggaaatctggtgtgcatgaattaattcaccatcactacaaggtattcaatactattttcagcggctatatatctgttatcgcatttgatatgctgatggataggatctcgaggcatatgaaatcatggaatcttggtatttattatattgtaaacgcggacaaatcttgcgagccaaagagcatttagagcgtcagcaagtggtgtgccaaacgcctatcgctgcggtcgagaagattattcggggcaagcgtaaagtggtagacgagcctttgtttcccaattatctgttcgtaaaatttgatcctgagtgcatccataccacgacgatcagctcaacgcggggagtcagtaattttgtgcgttttggcgcagggccggttgttgtctcagattcgattattcaagctctgctcaactattctcaggaagtgattatcgatcctgacacgcctgcttctggggacaaagtccagattactgaagggattttcgaagggttacaggccatttacgcagagccagacggcgaaacgcgctcaatgttgcttctcaaaatcctgaacaaagaagttagtcaaagcctgagcaacaaccagtttgagaaaatctgatatcaatctgaaaacatgacgaggcaagcgtgctatagcgcctgcctcgatattaatgtctagcgctgcatatgctcatcatgcagccactgagcaacctgcttagcgaaataggttaataccccatccgcgcccgcacgtttaaagcatagcaatgattccattaccgctggtttttcctgtagccagccgttttgaatcgccgccatatgcatcgcatactcgccagaaacctgataagcaaaggtcggaacgccgaaagtatctttaacacggcgcaccacgtccagatacggcatacccggtttcaccatcaccatatctgcgccttcctgcaagtcctgcgcaatctcttgcaaagcttcgtcgctattggctgggtccatttgataggtctttttattgccacctttcaaattgccgctcgagccaatcgcatcgcggaatggaccgtagtagcaggaagcatattttgccgaatacgccatgatttgcgtattaatcaacccttgagcttccagacaatcgcgaatcgcgccaatccggccatccatcatatcgctcggcgcaacaatttcagcccccgcttccgcatgagatagcgcctgacgcaccagaatatctttggttatatcattgataacatagccatcttcatcaatgatgccgtcctgaccgtgggtggtataagggtctaatgccacatcggtcaacaaccctagctccggcactgcgtcttttaacgcacgtaccgctcgctgcaccaaaccgtcaggattataagcttcctctgcgtgtaaagatttgaagctcgactcaatgacagggaacagagaaagcacgggaacaccaagtttcgcgacagcttcagcttccttcaccagcagatcgatagtcatccgcgagacgcccggcatagaaggcacggcctcttgtcggttagtaccttccatcacaaacacgggataaatcaggtcattaaccgtcagttgattctcggcaaccaggcggcgactgaaatcgtggcgacgaacgcggcgcatacgacgacctggaaaagtacccggaaatgcatagctcatttttctctcctaactcaaaccaaccggaaaacccggcgagcgttttcagcagttttctgtcctagccattcagggtcttcttctcgccaggcagcaacctgccggacgatgtgaggcagaaaacagggttcattgcgacgagatgcaggtttaggatgaagatcccggggcaataaataaggggcatcagtttccaacaataaacgttcggcaggaatacgtggcaataaggctcgcagctcaagaccacggcgttcatcacatacccaaccggtcatacccactgacaaacccagcgacagacaatcatccaactccgaagccgagccggtaaagcagtgcacgacagccgcggggagcttttccagccagggagacaacagatggacaaagcgatgatgagcatcgcggcaatgtaaaaatactggcagtgacagttcggctgcaagagccagttgcgcagtaaatgccgtctcttgctctacaggtgtagaaaagttgcggttaaaatccaacccgcactcccctacagcgacgacagaaggtgaagccgctagagcatgaatttgctgctcaaccgacgcgttccaactactggcatgatggggatgaacgcctgccgttgaccaacagtaatcagggtactgggccgccaatagtgcagcttcatggctttcttctgcgctggtgccggtaatcaatagaccagcgactcctgcttcttttgctctttcaaccacctgatgtctatctttagcaaactgtgtactggttaagttgacgccaatatcaaacatggttatcccaaaacagaagccgcccaaaggggcggcttgacttgtaaaactgaagcttaaggtgctttaggttggtcttcctcgtcctcatcctcttcttctgtcaccggacgacgctgcttaccgacataaaaacgggcaaaaaagacgccaacctcaaacagaagatacattggaatcgcgagtaacgtttgtgagaagacatcgggcggggtcaacaacatccccacgacaaaagcgcccacgagtacataaggacgttttttcttcaaatcttcggggctggttacgccactccaacacaataagataatcgcgattggcacttcaaaggaaatcccgaaggccataaacaaagccataacaaagctgaggtaattattgatgtctgtcgcaatcatcacgccttccggcgccgttttcgcaaagaaaccaaaagccaacgggaaaacgataaagtaggcaaatgccattcccagatagaacagcaggctgctggaaaccagcaacggtgccatcaagcgtcgctcatgcttatacagcgccggtgcgataaatgcccacacctgataaagaatcattggcgcggcaacaaaaaccgacaccatcatggtgagttttatcggcgtaaagaatggcgatgcgacatcggtcgcaatcatgctggcaccttgcggtagctgctttatcaacggcgctgaaactaactggtagatatcattggaaaaataaaccaatgctaaaaaaaccaccaatacggtgattatgcaattcaataaccgcttacgcagttctatcagatgactgataagaggttgggtatcatcaacagccatgtttaccgatcgccgcctggttggttaagactaggttgtttagaagctggctctgcatgggataccggcgcggagttaaccgaattcgccactaccacatcagtttgatccgccgccgcagcgggcgctttatcttccgaatggctttctacgtggtgcttttcgagattaactggcgcttccggcgctttcaccggcgcagaagcaactgtcgctgactccgcaggagtcacgccatcatgaatagcttccggatcggtcactagcgggttatgaatggtatgctgctccagcgccgaatccggccggtaggaacgcttcagcgattccgccgcatcctttaactcatccatggaagcctttagctcaggagtcagattttgcaggcccgcctgttcggcttttttcaggctatcctgaagttcctgcaatttgagttcctgagacagctcattttggaccgtagcagcaagcgaacgcaatgcgcggatccagccagccacggttcttactgctaccggcagacgttcagggccaagtacaaccaggccaatgaccattaccagcagcagttcactaaacccgatgtcaaacacggtttatacctgctctttgttctgactcttagactcttcagcttttacttctggctgcttatcggtaatagtcttcgttgtaaaatcagcgtcgttactggtcttttcaacgtttgtcggagtctgggtatcgtcaccaatcgcttttttaaagcctttgatggaagcacccaagtcagaacctaaagtccgcagcttgttagtaccaaacagcagaacaacaattacggcaatgattaacagttgccaaatactgataccacccatttcaatcacctctattaacaggggttattccaaagataaccgcattatacggcatagtttgtctctggatactgatctaacttactacgtcttacctaatctttatacggcagacattatttgtaacgacgagcttttcgaaactgaccgctacgaacttgttcgtctccagccgataacccacgccaatgctcccgccaccagtaacccgatagaaatctcggttgcaccagacagctggaaaatcgttccactcactaatagtgtagcgccaacgccgaacaaataccgtgattgcccctgacgttgttgctgcccttgcatctgcgttgtgagcttatctacgctttgctgcaatagtttatgctgctgaaggctgtcgtaaaccagttcaggcaactcagggaatttctctgcccagaaaggtgctttttccttcaatgctcgaataaccgccggaatcccaacctgatctcgcagccagctttcaaggaaaggtttggccgtggtccacagatctaactgcggataaagctgacggcctaacccctcaacatagagcaatgttttttgcagtaaaaccaactgtggctgcacttccatattgaagcggcgagcagtattaaacagattgagtaatacgtgcccaaacgagatttcagccaacggtttttcaaaaatgggttcgcaaacggtgcgaatggcaaattcaaagtcttcgacgttggtatcgcgaggaacccaacctgaatcaacgtgtaattcagcaactctgcgataatccctattgaagaaagcaatgaaattctcggccagatagcgcttgtccgctttattcaatgaaccaacaataccgcagtcaataccgatataacgtgggttctcagggtgttcatagctgacaaaaatattccccggatgcatatccgcatggaaaaaactgtcgcgaaacacttgagtgaagaagacctgcacgccgcgttcagccagtaatttcatattggtgccctgactttcaagagccgcaatatcagaaacgggaataccatagatacgttccatcactagcacgctttcccgacaataatcggagaaaatctctggaacgtacagcatcgggctatcttcgaaattacggcgcagctggatagcattggccgcttcacgtaacagattcagctcatccaacagcgttttttcgtactcgcgcaccacttctctcgggcgcagacggcggccatcaggcaacaatttaggtacccaaccggcaagtcgatacatcaaacggacatcagctttgataatcggccgtatatctgggcggatcaccttcagcaccacttcctgaccattctcttttaaacgagccgtatgtacctgagcaatagaggccgatgccagagcttcctgttcaaaatcatcaaaccaggtttccagcggcccgcccatcgccaactcaatgtgcttacgcgccagcgcgccatcaaatggggccacgcgatcctgtaacaaggccaactgatcggcaataaccggaggaaacagatcgcggcgggtcgacatcatctggccaaacttaatccagacggggcctagttcctgcaacgctaaacgcagacgctcgcccagaggcttatctttgtgacgattaggaatccagaagaacagatagcggccaatgcgtaatggcagcgttaaacgaatcttcgggattaactcatccagtccgtaactcaaaaatacccgaataatcaaatacaggcgccgaagttctcctggcgtcatcgttttgcctccatcttggccaaccgggcatcaaaagcatccacatcacgcttaattgcatcaacttcttcgttaaaccagacaatctccaacggagccggtgccaatttccactcttcagttaatacttcagccagataagcctgctgctgctgaaaacggctgactaaaaacttaccgcctttacgcaatgtctgccctattgtttctgctgcgatatcaccaatatagggcgctagccattcggcaggttcccactcagcgagatctaataaagccaccaattgttgaacgacctgaatgtcaccatcgacgatcagctcaccgctgcgcattaaaggtgacagctgctggcgatcccgaagcttcgataacactgcaattccggtttttaccgtacagtccgcattgccttcccacgcgctcacaacgtcaacctgggcatcgctgaacaccagaaccagaggttggttcagctcatgcagctcaacacgtaatactttggaagacaaacgagagcgagccgctttcataccgcgatcgcggaatagcagactattgagtgcagtttccagagccgccgttatcagcggcgttaataaaatcggcttcagcaacattggttttaacaacattggttttaacaacattggttttaacaacattggtttcaacaacatgggcacatccatatcagaacttaaacccacggtgtaatgcgacaataccgccggtcaagtttgtataggttacattttcaaagccggcatcaaccatcatatcttttagcgtttcctgatccggatgcatccgaatggattcggtaaggtagcgatagctgtcagcatcattaacaaccattccaccaatttttggcagaatgtggaatgaataggcatcgtagactttagtcagcggctccagcagcggtttggagaactccagaaccaacaggcgaccacccggcttaagaacacggaacatggatcgcagcgctttttctttttcggtgacatttctcaaaccgaatgaaatcgtgatgcaatcaaaatagttatcagggaaaggtaaagcttcagcatttgcctgcacgtagctaacgttgccaagaattccgctatcgcgcagtttttctcgccccattcgcagcatggattcattgatatcggccagaacgaccaggccttgctcacctaccagtcgagagaatttggccgtcagatcgcccgtaccaccagcgagatccagtactcgctgaccacggcgaacgccgctacaatcaatggtaaaacgcttccagatacgatgaataccgaatgacatcagatcattcatcaaatcgtatttcgccgctacggaatgaaaaacttctgccaccatgccttctttttcttctttggctatggtgcgaaaaccgaaatgagtggtttccttatcctgatctaccattttctctgcctgcttttcagtcaatctttcggaggagtgtaccagaaccgaggtgaaagccccacttcgcccagcgttagccggttagcctgtccgctgattttcagcgcgaacatagcgagtgagacactgctaattctgatatttcagtgaagtcgaatcatcttgtaacgacgattcagcctcatcgtttgagagggctaaatccccctctggatcgtgctctgcaatggcgcgtgcagccaatgacgggctaataggttttttcacttcaacacctaaggcacgaaaactttcaacttgccctatcaggttaccacggccttgagccagtttgttcattgcctgacgataacttatatgtgccttatcgaggctttggcctatggattccatgtcatccacaaacaaacgcagcttatcgtagagcttgccagctcgttcggcgatatgttgggcattctgactctggtgctcgtaacgccataaattcgtaatagttcgtaacgcgaccagtaacgttgtcgggcttaccagcatgatgttgtgctgtagcgcttcggtgatcaactccggctgcctatctatggcaaccaaaaaagcaggctctaccgggataaacatcagtacgtagtcgagcgtacgtaaacccggcaactgctgataatctttacgacccaactgtttgatatggttacgcaatgatgaaatatgctcgttcaaagcctgagttcgctcggtgtcattatcgctattgaaatagcgctcataagccaccagcgacattttggcatcaatcaccacgtccttaccctgcggtaaacgaacaatcacatccggctgcatccggctattgccttcaagattgacgctaacctgagtttggtattcgtaaccgtcccgaagtcccgaggcttccaacactctgccaagcacaacctcaccccagttcccctgagttttattatcacctttgagcgctttggtcagattgagggcttcccgtgccatctgggcattaagttgctgtaggctccggatttcgtgagtcagcgtatgacgctcacgggcttcctgaccgaaactatcctgaacctgacgacggaaaccgtccaattgctcgcgcaaaggcaggagcaacttatccagactctgcttattctgttcatcagccctacggccagtttgttcaaagatgcgatttgccagattctcgaactgagtggtcaggcgttgttcactattcatcaataatcgctgcttttcttcagcagccaggcgcgtttcctccagacgaatggtgacttcacgcagttcggcctcctgcgcactgttcacttctctctgggcgcgcagttcctgattaagttgctcacattcattacgccaatgattaagctgctgtagcttctcactgccagcagccagctggctatgcaggctgcgtaattccaacgcattctcctgcaattgttgctctttacgccgttgggtctcctcctgctggactaagtcctgttgcgactgttgcaatgattgttccaacagccgtagttcagtttctcgctgtgtattacgctgctggaaacgcaaactggcaattaaccagcccagcaggccccccataacacagccactcaagccccaaaatatactggtatccacgctgcctccgcctcattaaccctctgcccgtcaaggtaaggggatactgtatggatgtccagagggttttcgccttacatccaaggatgcgaaacagtacgcaaaactataactccatgcaaaattcggtattctcgccaccggtaaatcggctaaaacaaagtggaaccgaatacaacctgtagggaggtcaacccatccaatgagtaagccatttaattccgaaagcaccgggcgcgaggatgccaaaggcccaaatcaacgccgaagtaatattggcaaactggaaataacgttgaggcatggcgcatatgccagcaaccaaaggaacgatggcgcgcagcgggccgaagaagcgcccgataaaggcaccaaatacgccccagcgctcaaaaaacgcgtgaccacgtaccagtaattgaggatttcgcgaaagtggccacatggttgccacgcgatcctgataatggaaaccaatccaataggagagccagtcaccgaagaaagcaccggccgcagccgcagcccagatcggccagaagggaattccgctttcaccgatgagcgcccctagccccaataagataacggtcgcaggcaataacaatgacaaaaaagccagcgactcaccaaaggcaaggaaaaagacgataggtgcagcccagatttcatgttcacggacaaaatccgttatgtaggttatgacgtcattgagggtcacatgcatcttcctgttattgatgagattacgagccaacagcataaccaattcacggcagctctaactcaacaaaaaataaacggccggtaaatgccagccgtttaaacaggttaacgtacagaattaaatatgtcaggcatttgccgtgacggagcgcttagacatctcggcggaacgacgagtccaaagctcacgccattttctcaaagcggcgatgaggatgattacgcctagcgtcatcataatgatggatatgatgccgttaaacaggttgtagcccgaagccgcagagttaaagtacacatgtctgatcatccaataaccggcataatttacggtaacaaacaggtaagccagcgggataatacaggtcagcatatagatacgtttggtagccaaacgcaggataatggttgcaccaataatcaagccaacggatgccattaactggtttgatacgccgaacagcgcccaaacggagttgatatcaccagagttcagtaaatagccccacagcgcacaggcgataacgctacaagccagagtacccggtagccaatccgtacgtttcagtggtgcccagatatcgccgaggaaatcttgcagcagatagcgtgcaacgcgggtaccggagtctacggcggtcaggataaatacggcttcaaacatgacaacaaactggaagaagtaggccgccagactgctgaaccatggcacgcggataaagatatctgtcatacctacggcaagagtaactgcgccaccggtacgaccgtagagatccagaccgatctcctggcttagcgttggtaggttaaccacatccatgcccaacgcgccccaagcttccgcagaggagttaattgcaaaataatcagcgggatgcaatgaagttgcagcgatcagcgccatgacgccaaccatacactcggccagcatagcgccaaaacctaccggtaaaatatcgctccacttatcaatctgtttcggcgtggtgccagaaccgataaatgcgtggaaaccagagattgcgccacaggcaatggtaatagaaataaacggccagaccgggccagccagaaccgggccaccgccgtggataaactgagtaacggcagggaactgaatttccgggttaatgaaaacaacgccgattatcaacgcgccaaatacaccaatcttcataaagctagacagataaccgcgcggagttaacagcatccacaccggcaaagcggtcgcgaagaaggcatacaaaggcagaatgatactgacggtattggctttcaacgtcagccattcacccagccaggttccttcgatataagggcccacgaaaacacagaccataatcgcggcaatacccacgtaggaagcgcctctcatgctgccggtcattcgctcccacaaacctacgcaaatggcgataggaatggtcatgaataccgcgaaagccccccaagggttgcgctccaacgcatgcaccacaaccatagataaaccggccatagtgattgtgatgatgaacaacatagccaaaccggtacaccagccggcaatcggccccagttcggattttgcgacttcagaaagagatttaccctgatgtttcatcgaggcaaacagcacgacggtatcgtggacagcgccaccgatgacacagccgattaacagccacaggaaacccggtaagtaaccgtattgcgccgccagcacggggccaaccaagggccccgctgctgcgatagccgcaaagtggctgccaaagttgacccattttttagtaggaacgtaatctttaccatcttcgaaggtgtgggaaggtgtaatttcagtatcatcgacctgcagtactttccgaacaaaaaagataccgtataagcggtagcagatcgtcagaatacatactgtggcgataacaaaggtaatcgcatgttgcatgattattctctccagggaatttatcaggcgttaacatacgcctggcctataagagaagcgctgaggatctgattaagcggtcgccagcatgattaagcggtcacaaaacgccgctaagtggcgatcggaaaattgaagatatacgaaagaagcaaaaagctgacgacggtaccgccgccaacaatatgatattaatcacaaaaaatgagttttatatttaagagttactcaagataatacgactgaagttgctctctttcagcacgacccagaccgaactcctgcagtaaccagttatcacgattaccatagcggtcattaatgctggttaatgcggtatgaaggaattcttctctggctgaaagcacgtaagcgaactgattcaacgcattatcgtgaagctttttagccagttcgctcaacattaattcgcggaacggcgcgagcgtcgtttcagttagcaagtaatcctccagaaccgttgcttcatcggctcccagcgcaaacaataccaacccggaaccaacgccagtgcggtcttttcctacggcacagtgctgcactacgccagtaccttcagaattacgcaataaatgaactaactgtcggtaagccgagttgttaaaaggcaagcggcgataaagctccagcataaatgaacgagcatcaaactcggctagcgtttcgttactgagcttatccagattggcgttgacgtcggtactgagagggttcgcggggaaatgatggtatgtggctccttgccaaaggatatcgggtttagcctgaacttcatcggcatcacggtaatccagtatatggccaacggcacgcttatgcagaaaagtacggtctttttcactcaaccgatctaatgaaccggagcgaaacagtaatcctcgcttaactctgcggccatcggctgccaggtaaccgccaaaatcacggaagttaataccgccatcaagcggaaccagtgagggatgctgtgtaaaaggggtagtcataatatcctcttattatatcgtccattataagaggtaaaaccttaccagattatcagtggaaggaaagaacgggccaccagaggcagcccgacacgcgattacaacaagcgacgagctgcttcaaccacgatttttaccgcatgactttcggttttttgcatagtctctgcgttaggaatttcttgctgggtacggtttacgataacaccggcaaccataccggcgcgcaggccttggctggcgcacatagtcaacagcgtagcggattccatctcatagttcatcacgcccatagcctgccattcttccatcgagccacggaaacggctcactacgcgaccagagaaagtatcgtaacgttcctgacccggatagaaagtatcggacgaggcggtgacaccaatatgcgtggtcgcgccaatggatttagccgcttcaaccaaggcggtagtacaagcgaaatcagcaaccgcagggaactccatcggtgcgaaatgcagactggcaccgtccaaacgcactgcgcctgtggttaccagaacgtcaccgacgttgatgttaggctgaatagcaccggtagtgccgatgcgcaggaaggtacgtacgcccaactgagccaattcttccacggcgatagaggttgacgggccgccgataccggttgaacaaacgataactgccttaccgtccaattctgcacgccatgaggtaaattcacgatgagaagccagatgtactgggttatccattaattttgcaattttctcaacacgttgtggatcacccggaacgatggccaaagtagcccctttcagatcgtccttcgtgaggccaaggtggaaaacatcggatttagacatgtgagactcctctttcatgagaaatattgtagggaggaacaaagaactactttactcaatatcaccgaattatttcgtgatagcagtcactttgatagaagaaatagaatgtataagaacaaataaagtgtgacaaaaatcacaaaataacaccgttcaggttattttttgtgctttaaaagccctaaataagagtaacagcatccagattcactcaacggccgaaaacagagtgtgtgtcagctcaccttttcaccgttcgagcacacatttaatccgttacgacatcgcctttccgccattaattgcaaatattacctatagttaaatccggaaaactcattcgctaacttcagggagaccattatgaagactgacccactcattactctcaggcaaacagccggaaagttcacgccggccgttaatccgttggcctcctccgttattcataccgataaaaaaggcattcaggccggtgatactacaatcccgtcgcagggtgatttgctgccagcttatctcgctaaaccggcacaacataatggcccttgcccggtggtgattgtagtgcatgaaatcttcggcgtgcatgaacacattcgggatatttgccgccgcttagcgaaacagggctatttggccatcgctcccgagctgtatttccgccaaggtgatgccagcgaatacaatgatatgaggccgttagtcagccagttggtcaataagatccccgaccgacaagtattagtggatttggatcatacggttaactgggcctcccgccacggtggggatatcagtaagttagcgataaccggtttttgctggggagggcgtatcgcctggctttatgcggcgcataatcctcagttgaaaacggcagtagcctggtatgggaaacttattggggataaaagccttaatagcccgaaacatcccgttgatattgcgatcaacctttccgctccagtactgggcctgtacggcgggcaggattcaggaatttcacaagatcagatagaaaccatgcgtcatgcactacgtgccgccaatgccgacgctgaaattattgtttacccggaagcgggccacgcctttaacgccgattatcggcctaactacaatgcggaagccgctcaggatgcctggcagcgaatgttggactggtttgctcgccacggcgtcaatgcccataaaccggtcgatgatgcctcttaaacgtttcaatccatatctttcaccaacattcccacttcggcataaacctcccccagcagcaagatagggggaggtttttatctatcagtcgcacaaaattctgcacgcatcaatttgatacttctattctccaatagcggtttcaccgtcagtacctatcagctataaaaaagggcgctaacaaagttgagaagcggagacatgtgccgaatgggtcggaacagcgtgagccgtcggcccccctctcggtgcagtcgccccaccagcttcggggtaactgcataggcttgccatcaacagcaaggccgccactgcgcctttgattcagtgataaataatcaggcttgctcttcacgcagccgctgggccgccaagaccatgttggccagtgactgacgggtttctggccaaccacgagttttcaggccacaatccgggttaacccacaggcgttcagccgggattcgctgggccgctttacgtagcaaggcttcaatccattccacgctaggcacgttcggcgagtgaatatcataaacgccgggtccaatctcatttggatagtcaaagtcttcaaatgactcaagcagttccatatctgagcgggaggtttcgatggtaatcacatccgcatccaacgcagcgatagaatccatgatgtcgttgaactcgcagtaacacatatgggtatggatttgagtatcatcctgcgccacggcggcattcagcttgaatgcatccactgcccagtccagataggcctgccattcagcccgacgcaggggtaaaccttcacgcagcgcgggttcatcaatctggataataccgataccggctttttccaaatcttccacttcatcacgcagcgccaacgcaatttgcttggcgatggtttcacggctcacatcctcccgcgggaatgaccagcataggatagtgaccggcccggttaacatgcctttcaccggcttgtcagtcagggattgcgcatattgggcccattcaacggtaatcgcttctgggcggctgatatcaccgataatgaccggcggttttacacagcgggaaccgtagctctgtacccaaccgttttgcgtaaagacgaagccatccaaatgttcaccaaagtattcaaccatgtcgttgcgttcagcttcaccgtgaaccaacacatccagccccagccgctcctgctcggcaatcgcctgtttgatatgctcgctgataccggtgcgataatttttgccatccaggcgaccttgtttgaagtccagacgcaagccacgaatttcagtggtttgcgggaaagaccctatggtggtggtcggccaggccggtaaattaaagcgtttacgctgcgcttcggcacgctgtgggtacgggttttggcgctcgctgtctttcggcgttatagccgccagacgttgttccacgtgtggattatgaacccgacgagaggactgacgagcgcgaattggagcgctgtaattcgctaattttactagtttttcttcgtctggcgcattcagcgctttggttaacagagacaattctgcacatttttgcagcgcaaaagcaaaccagtttttcacttctgcatccaaacgggtttcttcactgagatcgattgggctatgtaataacgaacaagaagtccccagccatagttgacgactgccgaccaacggctgcaaacgttcgaaccatgtgctcagatcggcacgccacacattacgaccattaatcacaccgagcgacagcagccaatctttgggtagtttctcattcagcgtagcgatatcgtctttaccagccactacgtctacatgcagcccctgaaccggcagagcgcgaatagtatccagattgtggccgatgctatcgaaataggtggttagtaatagtttaacctgcccttgtagcgactggtaagccggttggtaagcatcccgccattctttaggcagctccagtaccagcgccggctcgtcgatttgtacccactcgatgccacgtttagccagctcggccaaaacttgctgatacaccggtaagatatctttcagtaaggttaaacggtcaaattgctcacctttgactttacccagccacagataggttatcgggccaagcagtaccggcttgattttgtgtccgagcgccagcgcttcgtcgacttcatccagcaattgcgtccaaccaagcttgaattcctgcccttgctggaactcgggcaccatgtagtggtagttggtattgaaccatttggtcatttctgccgccgctgccggtttaccggttggcgcacgaccacgaccaatgcggaataatgtatccagatcgatactcccatcagcattctggtggcgtgccggaacgttacccagcaacaaactcgtggttaacacatggtcgtaccaggcgaaatcgcccaccggaaccagatccacgccggcttgctgctgttgctgccaatgacgagcccgcaattcgcgccccacattgagcaattcttcctgcgtgatgttgcctgcccagtaactttcttgtgctttttttagttcacgtttcagaccaacgcgtggaaaacccagtgtgtgatttaaaattgccatcgtcatactctccatttagccatccagatgtttacacatccataatcagcaggtactgtattaaccacaagcgcaattttttcactgtcactgtgaaggactctcatgatcgaactgaaacacttacgcacactgcaagccctgcgtaataccggatcgctggctgcggcagctacacaacttcatcaaacccaatctgccctgtcacatcagttcagtgatttggagcagcgtctggggttccgtttgtttgtacgtaaaagccagcctctgcgtttcactactcagggagaaattctcttgcagttggccgagcaagtcttgccgcaaatcaaacaggcactgcaaacctgcaaagaaccccatcaaacggccctgcggatcgctattgaatgccatagttgtattcagtggctaactccagctttggacaattttcaccagaactggccgcaggtcgcgatggatttcaaatcaggggtcacttttgatccgcagcccgcgctacaacaaggtgaacttgatctggtactgacgtctgacattctgccccgcagcggtttgcattactcgccaatgtttgattttgaagtccgtctggtgctgtcgccggatcatccgctggcagcgaaagcacgcattgaaccagaagatttaaccgatgaaactctgatgatttatccggttcagcgccaacgcctggatatttggcgtcatttcctacagccagcaggcgttagccccgcgctaaaaaatgtcgataacaccttgttattgatccaaatggtgtccgcacgtatgggtattgccgctttgccgcattgggtggtggagagttttgaacgtcagggtttagtcgtaacgaaaacactgggggaaggtctatggagccgactgtacgccgctgtccgtgacggagagcagcgccagccggtaacggaagcatttattcgttcggcgcgtcagcacgcttgcgctcatctaccttttgtaaagaatgcggagcgacccaacgccggtgtacccacagagaggccattatcaccgtcccaccaataataaagctcggccaatgcggtttttcctgccagatagccaggttgaccaataggccagcaggaacatggacattattcataatgccgagggtgcccgcatcaacctgcgtggcaccgtagttccacataaaataacccagtgcggaagctccaacgcccagccaaatcaaaacgccccactgcaactcggtggttgggagtttatttgcgttaccaaaggcgaaccaagcgacgactgcgaccaacaaggctcccagataaaaccaggaaaaagcggtgtgctgcggaatcggatgcacttccatcaggcgtttgtagccaacctgtccaatagcaaaacaaacattcgccgcctgaactaaagccaatcccagccagaaatgctcgctcagatggtcataacgaatgatagccgcgcccactaccgctaataaagcactgagtgcataaccccagcgtagccgctgaccgcggagaagatcataaatcagagtgacatacagcggcgtcatcacggtaaacagcaggaactccggcacgctgagatacaaataagcacggaagctgaacaggtacataatacctaactgaatagcgccaacggccatatacagcgcaatcactctgccctgaatattcttccagcgaataaacggcaggaaaaccacggcggctaaaccaacgcgcatcagcacggagaaccagctatcgacctgacccgccagatattcgccgattaagctgaaagaaaatgcccacaagatagtggtaataaccaataacaacacgataggttaagctcatcgaagaaataaaaaccaattgtatcggaagcgagagctgaattttgcaccaacatggttgacgtatgcataattattgttcgattgattgtctttcgcagattctggcaaccagaaataaggaatttaagatgagacaaatacattttctgctgggcgctctacttctgcccaccgtagtattggcacaaaacagcctgacgccaacgcctttggagcagcaacagcgcgtattaaatcaacaaagtgaactgcaccaacagcagcgaactttgataaatcaacagcaagaacagcgccgcttgcagcagcaatatcaatattcgcaggatcagcgccgtttgttacagccaacaccggtggctccgattgctccccccgccgatcctttcaagcgaacgacgccaacggtaccgagtattcagccggtaaaacctgcccaataacgctcagattctcacgcccattagtgttaaaatcagcggcgtagttattgcagccaacgcggtagacatcactaaactggcagcggccgggccggtcaatgcgttaaattgtcgcgacatcagatacacgttgactccggtcgccatcgagccaagcaataccaccacctgagtttccagcggtggtaagcccatggcccatgctagaacccacaccgccaatggctgaacgatcagcttcagaaaacacatcgcactgctgatacgccagccatcgctgacacggtattccgccaatcccatacccagtaccaccaatgacagcggcggcgcaacctgccccaacatactgaccggctgatcgatcatcggcggcaatttccatcctgtcagactgaataaagtgccggagataatgccaataatcagcgggttggttaaaacactgcgcgcggtcttggcaaagccttgcaccgtcagcgaaccgttacgcgcccattccaccgacaccgtgactaacgtccataaaatcagaccgttaaacactaaaaccaacgccaccgctggaatagattcttcccccagcatcaaagtggctatgggtaaacccagcatcacgttattggaaaatatgccgcccaaagcgaataccgagccggaaacaccgtccaacttgaatacccgccggccaatgattcgcccaagaataaacaccaacagacaactgccgaaaaaggcgattagcaggcgcgcgtctaccgcaggccgatcggcaaaattactcatcatccggaatagcatggccggtaaagcgagggaaaaaacgaagcgcgtcaggccatcggtaatgtttgacgtccattttccgattctgaccaacccatatcccagaaccaacaatacaaataacggcatagacaacaagatctgatgccagagggaaaagataaaggcgggcatgaataatattcctgtcgcgggttagggtcagcccgcctgataacggaggctgacctaataccaacaggagtctgacgggtcagcgttcggcaaaatccactgcgatcaaatctatacggtcggtgcagatacagtcaacgccccaatctaacaatacccgcgcccgctccggcttattcaccgtatacaccaaaatatgcaatccggcggctttcaatagcgccacgcgctccgccgtcagctgtttatgattaatatgcaaagatacgcagttcagacgccgcgtcagctcaaaccagttttcatcccattcgtccagtaacagcccgcgtggcagttctggggccgcttcctgcgccgcttcctgcgcggtaacagaaaaagaggaaagcaacggaggaatagcctgaccttcccacaacaaccgagccgccagcgcaacgacgcggccagtgtaagcttctacgccggtggtgggttttatttcgatattcgccgccataccgtgctcagcgcagcgcgccgccacttcagacagcaaaggcagccgctcatccttaaacgctgagctaaaccaattaccggcatcgagttgaaccaatttatcccagggcaaatcccccgcaacgccccagccgttgctggtgcgctccagcgtatcgtcatggagtaaaaatatctggccgtcctgagaaagtttggcgtcaaactcaatcattttgtggccatggcgcgcgccgacgtcaatggccgccagcgtattctctggagccagtgaaccaccgccgcgatgagcaacaatgggaggataaggccagtttatattcatcattccatccgtaatccgctttcggtatcaaaaaaatgcagcgcttgcgcgggcagcgtgacatataaggtactgcccacatctggcatattctcatgggaaagacgagcaatcacaccctgtccatcccagcgtccatgagccagattatccgcccctagcaattccagcgttagcaagtttagcgctactccgccctgctctaacgtactgagttgaatatgctctggtcggatacccaaggtcaaccgccgatccgcccattccggtttagcatgctcaagcgggatacaagttccgtcgttcagtaaaaactgctcgccgttggcgctaacgctgcccgctaacaaattcatcgccggagaaccaataaaactggcgacaaacaggctggccggccgcttatacacttcgctcggcgtaccgatttgttccgctacgcctttattcatcacaatgacccgctcggccaacgtcatagcctctacctgatcgtgagtgacatataaactggtggtttttaatcgacgatgcaattgctgtagctccagacgcatttgtacccgcagcttggcatccagattcgacaatggctcatcgaaaagaaaaaccgcaggttcccgcacgatagctcgccccatcgccacgcgctggcgctgtccgccggataattcgcggggtttgcgttgcaacagcggttccaactccaggattcgcgccgcttcgtctacccgctggcgtatttgctctttgccaaatccgcggattttcaggccgtaagccatattgtcgtagacgctcatatggggataaagagcatagttttggaataccatagcgataccgcgatctttgggttccagattagtcacccgacgattatcaatataaatatcgccgctggtggtcgcctccagcccggcaaccattcgtagcaaagtggattttccgcagccggaagggccaaccatcacgataaattcgccgtcggcgacgtctagatcgatggttttgatcaccggcgtcacaccgtcataggatttacttactgcctgaagctttaaacatgccatatcagatcacttctcactgtctaccagaccgcgcacaaaccagcgctgcatcagaagaaccaccgcaaccggtggaattaacgtcagaatcatggccgccatcacctgattccattgggtcggcgcgcccgaactggagatcatgctgcggataccggctacggcagtgcccatcgaggcatcgctggtaatcaatatcggccacagatactgattccagccgtagataaaggtaataacgaacagcgccgccagattggtttttgacagcggcaatacgatgtcccagaaaaatcgcatcgcaccggcgccatcaatgcgcgccgcttccagcagttcatccggcaaagtcataaagaattggcgaaacaggaaggtggccgtcgcggaagccattagcggcagcgttaatccggtgtaactgtccaacatattcaggttggcgatcacctgaatagtcggaaagattcgcacttccaccggcagcattagggtgagaaaaatcagccagaaaaacagattgcgcagcgggaaacggaaataaacgatggcgtaggcggagagaatcgacaccgtaattttcccaacggtaatggcaaatgccatcacaaaactgttaaacagcatcagcccaaagggagtgccgttgctgcccacgcccccgtgccagatattgctgatgttttgccacaaatgagagccaggaaccagcgttatcggcacctgaaacacctgttggtcatccagagaagcggcaacaaaagcgacatacagcgggaataaaatcagcagcacgccaataatcagcatcacatggcagaaaatatccagccctcggcggttctcaatcattggtaacgcaccttacgttcaacaaagcggaactgaatcaccgttaaacctatcaccaatagcattaacactacggattgagcggcggagctggagagatccaacccggcgaaaccttcgcgatagattttataaatcaatgtagtcgtggactgcactgggccaccgccggtagcggcatcaataacggggaatgtatcgaaaaaggcatataccagattgaccaccagcaggaaaaaactcacaggggaaatcaacggcagcacaatattaaagaagcgcctaaccggccctgcgccatcaatcgccgcggcctcaaccagtgaacgaggaatggactgtaatgccgcaaggaaaaacaaaaagttatagctgatttgcttccaaactgaggccagtaccactaaaaacatcgcctgaccgctattttgggcatgattccagctgtagcccaacagcccaagaaagtgagtaatcaacccaagtccggggctaaacaggaaaatccacagcaccgcagcgaccgcaggagcaaccgcgtaaggcaaaataagcagcgtttgataaatacggctgccgcgcaggacgtaatccaccaaagcggcaaaaaacagcgaaacggccagaccgattccagccactaatccactgaaaatcagagtggtatagaaagaggccagatagtattcgtcctgaaatagctggctaaaattgcttagcccgacaaactcactggaaagtccgaaaggatcgagagactgaaccgaataccacagcgcttctaccgcgggccacaggaagaaaatggcggtaatcaataactgcggcagtaccaacaaataaggtagccaactacaggaaaaaccggggcgggacgtactcataaccgattaactctttgcaatgttgaactcttcacaccacgctcgcggataaccctatgcagctatccgcgaggcggtgttctccggtttatcaccgaagaattaaattacttattggcttgttcgaagcggcgtagcagcacgtcaccgcgttttaccgcgttgtctaacgcttcctgcggcgtcttcttacctgtccatacgctttccagttcctcatcaaccagggtacggatttgcggcatgttgcccagacgcagacctttggtataaggcaacggcggcttgttcaacatttggcgtgtggcaacgtctgcccccgaattcttatcgtagaagccctgttgtctggtcagttcgtaggcggcggtggtaatcggcagatagccggttttctgatgccattctgcggcaatttccggctgtaccaggaattgcaggaattcggctacgcctttgtaagtttctggatttttgccattcatgacccacaaactggctccgccgataatggcgttctgcggcgcatttttagcatcggcgtcgtaaggcatcatgcccacaccgtaattgaattttgcgtagtgacgaatatccgccagcgaaccggaggaggcagtagtcatagcgcagtcgccgttatagaacttggcggtagattcatctttacggccaaaataggtgaaatcacctttcttattcatatcagacagcagctggatatgtttgacctgtagggatttgttgaactcaagaaccgcatccatgccgtcaaaaccgttatttttgctggcgatcggctgaccgtgccaagcgctgaagttttcaatctggatccagccttgccagccgctggcgtaaccgcaggtcataccggctgcgcgtaatttctcagtatctgccgccagttcctgccaggtttttggcggctgatccgggttcagaccggcttttttaaacgcatctttgttgtaatacagcaccggcgttgagctgttaaacggctgggataataagtggccggttttagcgtcagtgtaataacccgcgaccgtaggaacgaacaccgactcatcaaaattcacaccggactctttaaatacttcaaagaccggttttatcgctttactggccatcatggtagcggtgccgacttcataaacctgcaaaattgctggcgccttacccgaacggtatgcggcaatccccgcggcaagattctgctcgtaattacctttatacacagggacaattttatagtcgggatgagcctgattaaaacgctgggctagagaatcaacctctttacctagctccccttccatagagtgccaaaaaggtatttctgtcgctgcgagcgcattggcactcaatgccaaagtgagcgcagcgccaatagcggttttacggagagtctgatagaacatgtctagcccctgaatcaataagtatggcccgcgcgtataatgaataaagggtcacgcgtgagcgaaataaatcagtttttgttcgaaagcaaacatgacatcgattagtgacagaaaaataatatttttatgacaatgaagcgacaaagaaatgacaaaataaaaacaattatcgacaaataaacaaattagccaacagtaatatatttaaatgaaagtaacggcacgtcattaattgaaaataattaaataataaaaatctatgtataataaattcgaaatcaaatcaaaaaatgaaaataaaaaataagataaagaaacaatatgtcgccttgaggaaaagatattaattatgctagtgtttgtcccgcacagagttaacggctttcatttaaatcatcaataaaacaccgttataaactctgcataaggaaattcaatgttatattataatacaaggaattaataatgaaaaaattaaccctatccgccttaatgtttgctgctttaaccagtttcactgcctatgccgattacactcaacagaatatagatatagatgcagaaatcaccgatttcgtgtctttagttgattcacgcaatgcaaagctgagtagcataacgttaactcgcaatctaaacgactataacaaccccgtttattcatcaactcaaactgttcagcttagaagtgcaaacccagccgataccggggttagcatttatctggaaagcgagccaacgttaatagctaacgagggtgcccaaaatgaaaaaagatttacagatctcagggtaaacctcgatggtcttgaattagaagtaggtgtggggcaggcaactatatttaataaggatgtcgatcttgacctgatcgttaacgcaacggttcctcagaatgctgcaacaggtgaaagatataccggcgttatcccgctaatgctggaatctgctgcttaaccgacggttaattagtctctagtgttaatattaaatagcggagatttcttctccgctatttaaaaatgaaatggaaattatcaccatgaataatggaatggaatccaatggtattaatcgccagtcggatattcagtgggattattttatttaatcttatgacgatgcctttttatgcttgtagcaaagtgctgatcgaacatttaccgccgccgggatttacagctatagatgaagattcatcgaaaagtttattgggcttggtgaatgggaaacatctacctgcgccgcttcattactcatctcaatcaaaagagatttctttcgataaagaaattttcttaaataacggtatcagccatgaaaccatttcagtattagataaattgctcccacagattgcctataatgaatgtaaatcagggtgcgattatttattatccggttatcgggttacattggataaagtaaacaatctattaataattagagataaatcccttgattatttgatgccctcaaccacttggggaatggttcataaccaatcactgaatttacgtgtggcagacaatcattatcgcgccatatcggccaatggtcagggttatatcggccttccctttcaatcctttggatacctgagctggttttataataaaaccgccaatgtacaacaaatgtggcatcagggtgaaacacacaaagggatcgggcaaagctggtatttgcaaaagaatttctcttcgctgtatttacgcgctggccgaaagaatcatctggataacggtgcggccagagtccaaaccctgatctcgcctggactcgatcggtttgtcactttcggaagccaaagttatatggcggagaaaaccacttccgcaggaacattgattttgtacgccgctcagccgggagatttcgatatttaccgtgacgatcagtttatccgccgcttccccgctcagttagggcgtaatgaaatcagctacaaccaattaccgtcaggctattacaacgccgatattcgtttaatcgatcgttctggccgcgaaattagccgggaaactatgccgatcgccaatatcagttttggtggtaatagcggttggtttgccactttcggtcaatctcaacccacaaaatttaaagaaaaaaatcccccaacggcttatctgttacagctggggcgcagctttctcactccgtggtttaattctaatctcagcttgttgatggataacgataaacactgggctgtagacggcaatatctcgcggccaatgtttctgtggagtatggatatcgctccgacgctaggcctgatgagcggcgagcagggttttggtggctacctacggctgagcggtggtaataaaacgctgggacgctggtcaatttcccgctatcaaacaccggatgtttcccgctatacctcaatgggaagcagcagcgcattttcttatggtcgccattttggcccaacggctctgagctacaattttaatcaatcggcgaatcgctctcagcatcgcctgcaaagtgattggcactggcaacgacctcagtatcgtattaatttttcgataggcgccaagaaagagtggcgaaataaccgcgccaatgactacggcctgtttttcaacgccagattaatgctccagcaacataatattcgcctgaccagtatttatgccaataagcagttaaccaacggtattgattatgatcattaccgccaaaatgatgacggcggctccggtttaagcctcaatagtaccctgagtggcaaaaaccatagtatgagcagcacagtatcccggcagggctcccgaggtaatttgtccatcgatgtgggagcgaacaatcaaaccatgttcggcggccttcgttacagcggtatgttcgcggccaatactcaggggattgctttggggccagccggctccggtggcggagccatgctggtcaccacgccggaaattggcgcgccttatagctttagagttcaaggtcaaccggtcaccggcggcagtacgaccgctatacccgtgccgctttataaccaccagagctttgccgacattcaaaccagccgcagtgatatggatatgcatattaatctgccggtcaacataatgcatgctcatccggggcaggttttctcggccaaagccgatattcaactcactctgctatacaacggtttctttagaacccaggaaaaccagccggtctccggcaccattgtcgaaaccggcgatgaggttcatcccaacggcctgttctctatttcttctggaaaagtattgaaatacatcaaggtgaaaaatgaaaccggcagttttctgtgtgatttaagccaacaacgtaaccattactatctttgccacccaaactagccattggtttcataattatggccggcttcatgaataaggaaataacgatgcctcgatatttatcactctccctactcttgcttttatctgctagcaataatctggcctttgctaatctcatcgcagacccaacgcgcgtgactgttgaaggaatacagaaatcacagaagatccgggtctttaacagtggtgataatccactgttcttggaggtttctttggtcaaagtggagaaccccggcgaggctaaagaaataaaaacgccgattggggaaattaaacatccagagatgatttttaatccaacccgcgtcaccctggctcccaatcaggaacgcgaggtttccattatcccgctcaagagccctcagcaggaaacgctttatcggctgtatctcaaaccggtacacaacctgaaagctgccagccattcgacagagccagcaaaagatatcagtgctccaatggttatcagcgtgggttatggcgtattgatacaccacgtaccggaaaaagcggcacagttgaagggggaggagccttacatatgcgttaagggtaacgtccaactcatagcaaaaggcaatattcaccgcaaattcaccgacctaaacgatgcgtcggcaccaaatgacaggggggctaaaaaagaaatcataagcagtaagaatatctatcctggtgttccttatcttactccagtgagaaaactatcaggaaaggtggatggcgagacaattaactatgactgcgaatgacagcattctgaccttactattatcgtcaatattaatagccttaccgttcgaaacgatcagcgccattgatttacgcccgcacattgtaaaagtagaggctgaggagactcacattgaggtaatcaataccggggaaagcacccaatacgtagccattgaattatatcgcctgaataaccccggtgttccgccagagcaagagtctttaactccgctaggcatgatcgcccaaccattattattcgccgcgccaatgaaattaacgctgggagccaatcagagcggaaaaattacgctaaaagcgctcggaaaaccgactaaagagcaggtttatcgattgagcgtcatacctaagcagaatctgaaaacgcagggtgaatctggctcagtgattggcgtgcaaatcgcgtatatggggctgattcgacacctgccccaaaagccagaatcgcgctggcatcaccgctgcgacgcagaaggcgtgacattgtataaccggggaaatatccgccagcgctggcaaaatttatcgcccaataccgattttaatctctatcccaaccaacagcggcagctcaagggacgtgaagtaacggcaacagtcgatgggcaatccgttacgcttccctgcaaacgtagcggagaataggaggttttatgaagattcaccctgttcaattcgcattattattttttacaatgtcatttccggcgatagctgccaattctattcccattggggatattgatgtcagcgtggaaataaccgaacaaccaaaaatcattattgagaaatgcaacggggagcggctcaacaatataagtttaaagcgctctctgaagccggaaaaaagaatctatcacgcgcaaacctgtgttgctgtaaaagtccggcgtgtgaaaggagggggaggattcagagtctggcaacagcagccacttattttacagaaatcccaaaataaggacggtgcaaataaagcattctcaccggcagaagttcgctggggcgattactcagcatccttacaaatcattcccgatgaaaaatcccccccacttatcttttacccgaccaataggttcgggggatggaataccgatacttataccttagatatttcggccaaaccgcccgtcggaagtcataccgcaggattatatcaaggggttttaagtttgatttttgagacggaatcataatattcctactaaatatgcatacatcagacagggaagaatgatgaaaaaaactgcgaattatcgaaaattttgctgctgcgtaggcgcgctggcttttacttcgacagcggctgtggctcaaattgccacaacagtaacgccgctttcccatagttataccaattgtcggatggcgctcagtctaaataacagatttattaagatcagttttcacgcctttgttcatgacgttaaattaaaagaaattctacgcgacaggtttaatctaaacgaggacatacccatcccagaccaaccggaagctacggtactaaatttattttttttcgacgaggaaggtcataaagacttagtgcaatacaacatttcagaaagtagcttaaacggcgaacaacccaccagatttgaagaccacaacaaacttgtctttacgcacgatgtgccgttccagcaacaaatgaagattacgctcgaaacccccaccaaagatctaaagtatttggccgttaatgcaactttgggttaccagtattccgtcggtgataaaatctatcggttaattgatgagaatgccgttacctttgggcgcgatggaaatacctgcgacacagttaatatccaaacggtacaagctccagcggcattatatgtcgatcctcagttcaagctgaattccgccgtctggcaactcaagcctattgatttatatcggctcaactcacataaaaaaaatgggctaacggctcaaatgatttatcccataagaagtattctttgcctgaattatccgccattaggaatagataatccgagctataccataacggctaccggcaaaaatcccacgcagtcgaataaccattttagcctgatgaaagactccgataagcagatccactatgcggttgagctagaggataacactggctccagctttacactgcccggttcctacaccataaatctcaaacaacaaactccaacgggaggcggctggaggaaaaaaatctgctggtcaccaagaatcacgctattcccgactgacagtaccgaacagggcctttattccgatacattgtcttttactattacgccgcactcttgaccgacgagcgtctaaactgagcgaaaaaggctcgataaaaccgagccttcgaaggaattatccccccagataagccgaacgtaccgcttcattggctaataaagctgcaccggtatcttccagtacgatgcgcccgttttccaacacatagcctctatccgccagctttaaagcctgattcgcgttctgctctaccaggaagatagtcatgccttcctcacgaagttgctgaatagtatcgaagatctgcaaaataataatcggcgccaatcccagagaaggttcatccagcaataacaacttgggctgactcattaaggcgcgcccgatagccagcatttgctgctcgccaccggacatcgttccggagcgctggattcgcctttcgtgcaagcgcggaaataaatcataaacacgctcaatacgttgctgatactgctcacggttggcaaagaagccgcccatcgccaaattttcctccaccgtcatgcgagaaaatacccgccgtccttcaggtacgatagcgatagcctcacgcattattcgtgcggtttgccaatcggtaatctcccggtcgaggaaatgaatagtgccttccgtggcgcgaggttcgccgcacagcgtgcccaacagagtggttttccctgccccatttgcgccaatcagcgtgacaatctcaccctgttgaatatgcagacttacctgatgcaaagcctgaattttgccgtagtgggctgaaacctgattcaatgacaacatattaagcctcacccactttattcacccaaataggcccggatgacatccggattattgcgaatttccgccggagtaccctgcgccaacggcgttccctgattcaccacgtaaatgcgatcggaaatgcccatcaccagcttcatatcatgttcaatcaacagcaccgaaacctgatgatgatcccgcagttccataatcagttgattgagctcgtcagtttcttttggattcaagccagccgctggctcatccagcattagcagttccggccgcgtgaccatacagcgagcaatttcgagacgccgctgctgaccataagccagatttcctgcctgccgattagcgaacgccagtaaaccaactcgttccagccatgtcgcggcacgagacagcgcgtctgcttccgcccgacgaaacgccggtgttttcagcaatccggcaaatacgccactttttaggtgctgatgttgtgccaccagcaggttttcaatcaccgtcatttcacggaacaaacgcacgtgctggaaggtacgaatcacccccattcgggcgatagcctgacccggtaaaccttcgagatgacgatcacgtagttggatgctgccaccggttggacgataaaaaccagtcaagcagttgaaaattgtagtttttccggcgccgtttggtccaatcagcgaaacaatttcaccttcatttagcgttagcctaacgttattgaccgccagcagcccgccaaaacgcatcgacagcccttctacccttaacaaaggttgcgcattcatgcctgctccccctgtttttctttcgcatcagctacttttaatttcagctctgggcgtttcattggtaacaatccctgtggacgccaaatcatcattaacaccatcaacgcccccagtaacaacatgctgtaggcattcaaatcacgcattaactctcgcgataccaccagcagaatcgccgccagaatgactgcaaattgcgagcccataccgcctaataccacgatggcgagtacaaaagccgattcgacaaaggtaaaggactctggactgacaaagccctgacgagcggcaaacagcgttcccgcaaaaccggcgaaggctgcactgatggtaaaggcggtcagcttgattttggttgggcttaaacccaatgagcgacaggcaatttcatcttcacgtagcgcttcccacgcccgccctaacggcatacgtaacaagcggttgatgataaatagcgtcagtattaccagcagcagcgctaccagatacaggaaaataatacggtcaccggggtcgtaagccagaccgaagaaattatggaaggtatcccaaccgccatctttggtcgtacgactgaattccagaccaaacagagtcggtttagggatctggccgatgccgttagggccgccagtgatttcagtattattcaacagcaaaatacgaacgatttcgccgaaacccaacgtgactatggccagataatcaccccgcagccgtaatactgggaaaccgagcaaaaagccgaacgcggccgccaccagtcctgccagcggcagactttcccaaaatcccagaccgtaataatgatttagtagcgcgtaggtatatgcgccaatcgcgtagaacccgccgtaccccagcaccagtaagccagacaaaccaaccaccacgttcaaacccaggcccaacatgatgtaaatcagcgttagagtggcgatatcaaccgttccgcgcgataccagaaatggccagaccaccgccgctacgataatcagcgcagccaacagcttttgtctggtggttgtcgcatcaaagctcggtaaaacccagcttgggccagagatcttcttcatgccttgttgcattaacggccgaaataactggaagaaaaacaccacggcacaaccaatggcgatccacatccagcgcacttcacccgcgccgtgcaccaccaaacgcgtgccgtccagcgccaattgtagccccatcagaaacgaggccagcaccagcatcacgaaagtagagataatcgcgttgacgaagttaagttgcttcatactttctcaacctccggacggcccagaattcctgtcggcattaccagcaatacggcaatcagcagcgcaaatgaaactgcgtctttatattctgtactcaaataagctgaggtgagcgcttcagctacgccgaggattaacccgccaatcatcgctccggggatactcccaatcccccccaataccgccgcagtaaaggccttcattcccgccataaaaccgatgtaggggttaattacgccgtagaattgtcctaataacacgccagccaccgccgccatcaccgcgccgatgacaaaggtcagggagataaccctatcggtattaatacccagcaggctggccattttcagatcttccgcacaggctcgacaggcccgccccatacgggaataacgaataaaaagcgtcagcgccagcatggcgaggaaagtcacaatccagatggtaagctgcatcgtgcttatcgttgcagcaaaaccgttgctttcagccagcgtccactgaccagtgaccagactaggcagagccaaatctcgcgatccttgagtcaggctgacatagttttgcaaaaagatagacatcccgattgccgagatcagagcgatcaagcgcttagagctgcgtaccggcttgtaggctacccgttcaatgctccagccataggcgctggcgatcacaatggccacaacaaaagccgaaccgatcaacagccaactggcgtcaatcccaaccatcattagggcggctataacgataaaagagacgtaactaccgatcatatacacttcgccgtgggcaaagttgatcatgccgataatgccgtacaccatggtgtaaccaatcgcgatcagcgcataagtgctgcccaaggtgacaccgttaaacatctgctgcaaaaagtagagaaactgttctgacatagcctaacccttaattctcttgcctggccgcccttcccacccgctccataccaatgatggcaggaaacatcccccggagacgggggatacattgcgggtaaaggggcctgattgccatcacaggcaacctcactgctgaatatttcgtgagtggttatttgacggcggtagaagaaccgtcggcatgccattcaaaaatgccgaattcgaaacctttcaggtcgcctttttcatcccagcttagcggccccatcacggtttcaaccggcttaccggttttcagatctttcaccaaatcggctggctcctggctaccgctacgttccattgctgtggttagcgattgcaatgccgcgtaggtagtccagacgaatgggccggttgagtccagtttcttggctttcagcgcatcgacgataggttggttggcaggaacctgatcgtaacgtttaggcagcgttaccaacatgccttcagaggcggcgccagcgatattggaaagcgaggagttacctacgccttctggccccataaagcgggtggccaggttagcctgcttggcctgacgtaaaatttgccccatttccgggtagtaaccgccgaagtaaacgaagtcgacgttttctttcttcaagcgagccaccagcgttgagaaatccttatcacccgcggtcacgccttcaaacagcacgacgtcagtgccctgttttttcaggctgtcgcgaactgagcgtgccaaaccttcaccgtattgctgtttgtcatgtactacggcaatacgttttggcttaatagtttcgaggatgtatttcgcagcggttggcccttggtcagaatccagaccggtggtacgcagaaccattttataaccacgggtggtcaaatctgcgttagtagccgctggggtgatcataatcacgccttcatcttcataaatatctgaagcaggctgtgtggaagaagaacaaaggtggccgataacatagcgaataccatcgttaatcactttgtttgccacggcgaccgcttgtttcgggtcacaggcatcatcatattctacgccaaccagcttatcgccgttgatcccacctttggcattaatatccgcaatagcctgacgagcaccggtaaattccatatcgccatattgtgccaccgggccagacatcgcaccgacgatagccaccttaatatccttcgctaacaccgaatggctcattgccataaccatacagcccgccagcaacgccttactttttgtcaatttcatccgcgcattccccatctgtcattgtgaacgtactgttgtgtttgccgggccaattcatcgctacttttagtttttatccataagtaataatgatttagtcttttatatggcaatattttctaataagactttatttttcagaccattaaacaggagttttatgctgcaaatcaactcagacaagcagaaacaagcggtgcaaacaagataaaataaggtgctatttgtagggtatttgcacaatcgatagtgggttgtgctggttatcattccatttactaatttttaactcggaaaatgcgcggcgtgaaaaacattttccgccgttcacgtacagaaaaacttacacatgcgcttcctctcagatccagtacactatccctctactttttattcggaatatccccgatgaaattgaccattgagcgcttaactcagctatcacatcaagatcttatcgatctggcaaaaatctggccaaaacagcaacccgccgactggcagagctggattgatgcagatcggccgctatttgccgcacgttttaaccaaagattgctgggagcagtgaaagtccggctgagtgcagagcgggcggagctagaagatttactggtacgggaagtgacccgtcgtcgcggcgtgggattgtatctggtagaagaaaccctgcgtcaactgccagccgttcagcactggcagttgagttatggcgaggtccctggtgttggacgctctgaaatggaacaatttatgctcgcctgtggttttcattctggcgagcagggctggcagcgttaaagccgctggcccatccgccatacggcggccacgttgcgtgcagtaacgcgcagattttcctgcgcttccgctaacgcctcgggtaaagtcacaatacggtttaccacggagaataccgcatctaaaccgtattgatgtactacctgatagtcctgagtcatacctcccgccagagcaatagtcggaattcctagcgctttggcggtccgagccacgccaattggcgttttaccgtgaattgtctggctatcaatccggccttccccggtaatcaccagatcggcaccattcatggcctctgctaaccctaatgcctgaataacaatctcaataccgggtttaagctgtgcgttgagcaaaccaaacaaagccgcgcccataccacctgcggcaccggctcctgccgtttcgatcactgaacgtcccgtcaatgcgtcaatgtgctcaccgtagtggcgcaacgcgccgtccagcgtgctgaccatctcaggcgttgcccctttctgggggccaaatacagcagaagcgcccttcgctccacacagcgggttatcgacatcacaggctacgatgatctcggtctgagccaaccgctcatccaacgccgataaatcaatatgatgcaatcgacttagcgccgcgccgccgccgggcagcgcttcgccctgagcatcgagaaaatacgcgcccagcgcctgcatcatgccagcgccaccatcgttggttgcactgccgccaattcccagaatgattttacgcgcgcctttatctaacgcagacagaatgagctggccggtgccaaaactactggtgtgcagcggattgcgctgttcctgccgcaccagatgcaaaccggaggccgccgccatttcaatcaccgccgtttcaccgtcgcccagccagccgtaaaaagcctgcaccggctgactcagcggcccgctgacttcaacctgaataatatcgccaccggtcgccgcgaccattgattcaacggtgccttctccaccgtcggccatgggtaatttaacgtaatctgcctgcgggtaaatctcgcgaaaaccttgttcgatagcttcagcaacctgcattgccgtcaggctttctttaaatgaatcgggcgcaataacaattttcatcaaatacctcgttaacccgccaagttaaatacgccgaacatcagcgtggaaaccagtgcaatggtgaagcccaccaacgtttcgtatggcaacagtttcaaacgctcatgcacctgcatattgacgctgccgccggttgcatggaagaaactgccgtgtggcatgtgatccagtaccgtcgcgccagcatgtaccatggctgcgccagccagtgccgttacgccaagatccaacaatgttgaactgaataccgccgaagccaccgcggtgcccgccgtggttgacgccgttgccatcgacatcagcgccccggaaatcggcgctaacagataagcaggcatacctgatgccgttaatccttcgatcagtacgtcttttaggccggaatgagcaataatgcccgccaaagtaccggttcccagcagcataatggcaaccggtgccatgcgactcaaaccggaaatcatatagcggttcgattcgcgccagcgccccatgatcaccgcgccaaccaaaccacccagaggcaaagccagcaacggatcgatggtaacacccgcaattgggcgcaaagccaacagcgcgatagccactaatggagccgaaatcgcagcggtaaaggacggaagctggttggtttcatgcacaatcagctcatcggcgttaaccttgctgcctttgtgtttcagatgcttagctaaataataggccacaaccaggccaaacaaaccggggataatgccggcggccatcagagaggtcagtggcacatggaaactgtctgcggccgcaatggtatttgggttcggagacatcacgttacccgccttaccgccgccaatcatcgccagcagaatagccattttggaaatatcggctcgatgagcaatcgccagagcaataggcgcaacggtaatcaccgctacatcaataaatacgcctacggcggttaacagcatagtcgctaccgccaaagccaacagcgcgcgcttctcacccactttgcgcacaattgtttctgcgatggtatttgccgcgccggattcaattaacactccggcaagcacaccggccgccaaaatacgcagcaccgcattggtaatgccctgagcgccgctgatcatcaggctgacggtttgaatcagatccgcaccaccgactaacccaccggcgagcgcgccagccatcatgccgtaaaccggcggaactttacgtaatatcagcacgatggagacaataagtgccaccagcgcgcctaaagctgaaaccgttgtcatgttctgctcccagtgtactttctaattttatttttcagggtaaggagccggcattatgtaaacttcaccggagaaaggcatggtaggattgaccagaaaataactaggataaacgagatgtaattgtagaaagccacaaatcagccgtagatttgcagaccgatatacaagcgcaacaaagaaggtaactgattgatttttaaacccgttatttcttctattttttgcaggcgatagcgtagggtattcacatgaatatgtagcagccgggctgattgagacagatcacaattctgatcaaaatactgttgcagcgtctgtcttagtacacctttaccatccgcagcgcaaagctgcgcccaactggtgcccaattcctctgcctgccaagtccccgcaaactcccctaacaacgccggtaaagagtaatcgttgtaatacagcgtcttatgccttaaccccagccgttcagccattccctgcgccgcacgagcggtgagataagagcgacgaataccttcaacgccggggaattggccaccgacaaaaatgcgcacatcgaaacgcgcctgaagctgagtcacaaagggctgaagctgcttatttaaaggacgcgacggcttatctccagcagccaacgccagcggtttgagcatcactaattggttaaaaccattcatgctaaccagatgatcacgaccagtcgcatccagcacatcaataagctggcgcagagattcatgatctggctgattcagttggataatcagagcgatgcgcggcaaggttaaattcagccccaaataggccgccattgaacctattgatgtgtcttgctgatactcagccaataattggctgactaactcttcccgatagcgtttttcccactgggtttgttccagcaaggcggcctgttccagaatcagctctgcagccattcgcactaactcggcataagcgcgaacctgcgccggttcaccagaaatgccaatgacgcccaccaactgctggtgaaaaataatcggcaggttaattccgggtttgactcccttcaacttggcagcagtagcacaatcaatttctaccactcgattttccattaaagccagcaccgccccctcatggcgctgattaaggcgcagcggatctccagaggcaataataattcccttatcattcatgacattaaccgagtactggatgatactcatggctcgctgaacaatctgccgggcggtggtttcttcaagatggttttgacgcatgggcttcctgtctggaaacgctggagaattaagggaaaacaagtattacgatagtgtacggaaatccaaacgccgttaccgataggcgtctcaaaaaaccgaatattgaaatgaacggatggcagttaaaagctaattcggaagaaaatcatataaaaaatattgatgaaaaccagaaaagcaaaagggcgataaataattatcgcccttttctgtctttacgcggatgttgctcttaggcttcgatagccatgcgtaactttttcatcgcgttcttttcaagctgacgaacgcgttctgcagaaacgccgtacttatcggccaactcctgcaaagtagatttgttgtcatcatccagccaacgggcacgaataatatgctggctacgctcgtccagaccttccaacgcataggtcagtttgtccgctgcgtggctttcccagttatcttcttcaataccatcggcaaaatcagaagttttatcctgcaaatacagaacgggagccatagactgaccgtcgcgtacttcatcgtccggagttgggtcaaaagtcatatcctgcgcggacatgcgagattccatttcacgaacgtctttgctggtcacacccagctctttggcaaccatttcaacttcttcctgattaaaccaacctaaacgctgtttggttttacgcaggttaaagaacagcttacgctgtgctttggtggttgcgactttgacaatacgccagttgcgcagaacatattcatgaatttctgctttgatccagtgtaccgcgaaggacaccagacgcaccccaacttccgggttgaaccgacgaactgctttcatcaagccaatattaccttcctgaatcaggtcagcctgtggcagaccgtagccagaatagttacgggcaacatgagcaacaaagcgcaggtgagacaggattagctgtttagccgcctccagatcgccctggtaatgcagccgttcagccaactcacgctcttcctctgctgtcagcataggataggtattggcagcccgaatataggcttccagactaccttgcggtactaaggctaaagtttgcatttctttggtcatttaaaccctctcatagcatgtgcagatcgtgcataaactctcggcgcgcatattttagcatccggataaccagattcaagcaccgggcaccttatcatttcactgtgctcttcgaccgactaacgccacaaaagttcaatatagatcacagtttcaacgctggatcctagccgataacctgtggatcttaccagtagttattgcctggaaatttgtagaaatggcggtagtcacgatgattatgcttcccctgcttaatcggaaaccgcaggggaagagtatagcaaaaattgcttattgcggtgtaaatcggcgtaaatgttgaacagttgccagccaggcggcgatccagccgatcatggcagaaatcagcaccagcagcagggattcatcccagctcagtccgtgcagagagaaactggtaccgaataccgtcgctacctgcgccactaccgaacccaacttccacaccagtgcttccgacagaattagcgatagaactgcaccacccagacctagcatcgcgccaccgttcaggaatggccgcagaataaagccatctgtggcaccaatcagtttcatcacattgatagtgtcgcgacgactgaaaatgctcaatcgcacgctgttaccgataaccaggaacaccgcaacgaccatcaacacgccgatcatcgccgccacttgcccaaccaggccggtcaacgccgccagtcttgcaaaccagctatcgtccatacgaacttctgccacaccttcaaccttggtgacacgatcccgcagggtatccagcgtttcagagctttggaaactcatttgcggcgtgatgatcgccaccgctggcagcggattctcttccagcatatccagcgcaccgccgaaacctgaccagttgcggaactcacccatcgcttcttcccgcgacagataattcactttttccacgccggcttctgctttcaatgcggttaccacattttccgcagcgttatcgtcaagagacttatccagatacaccgtaagctgtggcgtcgggtaccactgttcagcggcggtgctgacgttcttccaaacgatatagcatacactcggcaacgtcagagaaatggcgatcaccatgaccgtcagcagggtagccagaggctggcgcatcatatcggccaacgcattgacccatgaataacgccactgttcgcgccagccgcctttcaacgctttggtttttgctttctttgcattattcgccatgacgcgctcctgacattcttccctgactgagcgttagaatcgggtaacgacgccgcgcaatcagcgaagtatcgtgggtggccatcaaaacggtcacgccaacacggttaaactcttcaaacaggcgcaaaataccttccgacagggcttcatcgaggttaccggtaggctcatccgccagcaataccgccggcttattcactaccgcacgggcaataccaacccgctgctgttccccgccagaaagctggatcgggaagtttttcgctttatccaataagccgactttatccaacgccgccgatacccgacgacggatatcttcggtactggcaccggcaataatcaacggcatcgcgacattgtcatacacggttcgatccagcagcaaatggtgatcctgaaagatcatcccgatctggcgacgcagaaaaggaacctcgcggtttttcaaccggctgatatcgtggccgccaaaccaaatgtggccggcactaggccgttcgatgccacaaatcagtttgagcagcgtacttttcccagcgccggagtggccggtcaaaaacgccatttccgccgggcgtagatgaaaatctaccccttgcagcgcttgtcggccgcccagataagctttactgacctgttcaaagcgaatcatccgtattaatcctctcgggcaaaaagagcctcaataaaatcgtcagccttaaatggccgcaaatcttcaataccttctccaacgccgatatagcggatcggaataccaaactgatcggcaatggcgaaaatcaccccgcccttggcggtaccatccagtttagtcagggttatccccgtcaggccaaccgcttcgttaaacagtttggcctggcttaccgcattttgtccggtgctggcatccagcgtcagcataacctcatgaggggcatcgccgtccagctttttcattacccggacaatcttcttcagctcttccatcaggtgagctttattctgcaaacgcccggcggtgtccgccaatagcacatcgacgccacgggctttagctgcttgaatcgcatcaaaaataactgaggcggaatccgcgccggtatgctgagcgaccacggcaattttgttgcgctcgccccaaacctgtagctgctcaacggcggcagcgcggaaagtgtccccagcggccagcatgactgatttgccttcggcctggaactgacgtgccagtttaccgatagtggttgttttacctacgccgttcaccccaaccatcagaattacgtacgggttcttaccgctgacatccaaaggtttgtcgactttagccagaatttcggacatttcctccttcatcttgccgtagagtgcttcggcgtctttcaactgcttacgactggcgtgagcggttaaggattcgatgattttacgcgtagtttcgacgccaacgtcggcgatcaggagctgttcttccaattcttcaaacagatcgtcgtcgattttcttaccgctgaataaccccataaaaccagaacccaggttttgtttggttttcagcaagctacgttttaagcgagcaaagaagccttctttcgttggcctttcctgttcttgagccacaggtgccactacaggttcaagctcgatttcgtccaccaattcagactcagcaagcgcagtagtcacttctggctctggctctggctctggctctggctctggctctggctctggctctggctctggctctggctctggctctggctctggctctggctctggctctggctctggctctggcagaataacttcaatatcttccaccgtttcgacagaaatatcagcctctgcttcaaccagagcagactcaggctcgaatacctgcggttgatgctgctccgtcaagaactgagccacagcttcagcaaccagcggctctgctgccggtatcacttcttctgccaatatctctacggattccggttgttcggtcaccgcagcgctaaccggttcgataaccgccgtcgtctcgatctcgttgaattcagccggctctacgtattgagtgggaacaatctcaggctcaattggcgtttcttccaccaacggcactacatcgatagccggggctatttctgccgccgcttccgcgttgatttcgctgtcccattcccccacctccgttggaacaacggattccgctgccggagtaggttcgtcagccgttacaagctcatgctcagaagccgcgggcaggctttcatcaaccactggctcagcgactggctgctcaattttttgttcttctttctgttcttcactctgacggccaagacccagccaggaaaaaaacccacgttttttttcttttgccatttgcgactacactcctcgcggttaaatcatggcttacataaataagataatagctcgccagtctatcactttcccccgagcagcaacacgcgcacgatgctgctttccgttgtgaattcaatcaacaaagcattaacgtttcccctcactgcgcacatcggtagaatagcggctatatcttctattcagcgccgtcaaaatggccacatttcaagcagcgagctatggcaaaaaaaccacaacaacaatccttcgggcagattcgtattattggcggaaagtggcgtggccggaagttaccggttcccgatagcccaggcttacgaccaacgaccgatcgagtgcgggaaaccctgtttaactggctggcaccgatgattcagggcgctcgctgcctagattgttttgccggcagcggcgctcttggtctggaagcgctgtctcgctatgctggagaaaccgtgttgctggaatacgagcgcaatgtggcacgccagctcactagtaatctggctttgctaaacgcagaaaatgggcaagtggtgaataccaacgccctgcaatggttggcgcaaccgggtaaacctttcgatttggtgtttctcgatccgccgttccgtaaaggtttgctggcagaaaccgtcaacctgctagagcagcaaggctggctgaccgatgaagcctggatttacgtagaggccgaagcggaaagcgcggccgcagacgtaccggccaattggcaattacaccgtgaaaaggtcgcggggcaagtcgcctatcgcctgtatattcgtcaccatgctgcgtctgacgcagcgcaggagccagagaatgttgattaatttcggtcgtttactgatgctgggcgtatgggcttttctgatcctgaacctgatccagccattccctagtccgttgaaatattttgtgaatgtcgcgatgatttttatggtgctgatgcatggtttacagctcacgctgctgaaatcaactcagcctaaggatcaaccgattagcggctggcagcaggtcaaaatctttatctttggtgtttttgaactgttggcgtggcagaaaaaacagccgccaatgccgaaaaagtaatttccatccctacgtacttttccaagccaaagctatttggctggctgaacggcggtaaaatcaatatagcgggtgccttgtaaacgcagggtgccctgcataccgatattaatttgttgatattcctgacgaggcaaaacaatattaatttcactgccgctcaggagcgggcgaaaagtcacttcatagcgtttatcttccgccacaatttcttcccgctgacgtgaacgacgattcggcgctaaaacctcacgtttattactaacctcaacctgcaggctgcgcattggagctttatcattctctgcatccagccggcgtttttgccaatactggcgcgtggctaaaataacaatcagtgccacaaccacaataaaaatcagcggtggtttgctcatgaattacacctaataaataaagctgtcgccgttatcagattcagggcttattgcccggtaaataagggaagttcatcacgttggctcccaaatcagagatacgcgcgctacctttttcggtcacgacatcaatacggatgacggaatgaagtggaatatagctacggttgacgccagaaaattcggttttcagtttttctgtcgacggatcaaccaataacgccgattggctatcaaatacaaaatcagcaatctcgataaacccgaacaaagagctgggcgttatttcacggacatagagttgataattcttaccattgttcatgaactgaatgcggtaaagagtttgatcgttcgccatggtgttacctatcgctatccttcgataatcaagctttcaggggaagagaaccggttattaacataccatgaagggcttaaagacgcatccgtgcggttagcgggtttattctgtcgttcgactgtaaatcaggcttgccagcgattgcttagccctccaccggtttacaccattcaccgtgatccatccaatcttcatcagagtcccctttaatccacacttcattgccatactgatgaattaataacgccggcttattttgatcgatattcttcaggtatttattatagacgggatggcggttatttaagatatcggctttgccgtaatgtatcttgccgggatattttcgattatcgacaaaagtgacatagaaattatcattgcgcagctcaattatggcccgcccattcttgaccaacttgcaattataagtaaaaccgggaaattccgcactataggcagcagaacagactgaaagagtcattaccatgataagtaacaatttttcttttttcatttttaatttctggcaaatagcgttcatattaaagtggcagaaataaactgacagctatggcagagtattattattctctaccgcttatataagctcataagcctgcgccaattctcgtatattaccgggttcaatactgttacccattaaacacggggaatattaatagcatctgctcaggctattttctatacttttattaacgaaaggttactttgatgtaacaataaatgctttaattaagttaatatatttatttaaaataattatcacgcttactttagcgtctgtttttcacacactcaagtacgaattttgacctacgaattcacgccgttgcatcacatataaaatcgcatgcaaaaatcattagtaatcgaatagcccctgttgttcatcctgacgatcccctacactgaaaagagacattggctgataattatcgttaccgagcggctattttttgcagaaactttagagaagaaggataaaaaatgagttggccattcctcgctgtatttttttctggttggttgtttgttgatgccagctaccgtgggccacgctggcaacggtgggtcttcaaacccgtaaccctgttactgctggttctactcgcctggcaagctccggtacttgggccagccggctatctgatcgttctcgggctgctagccaccatggctgccgacgctttgctattgctacccagtgagcgcttactttatgccattggcgcattcttcctttctcacctgctgtataccatcagtttcgcgacacagatgacagtcagtattttctggccgctgccgttggtgctgatcatcataggtgcactgttactggcaacaatctggacccggttggaagaaatgcgctggccgatcgcaacctatgtcgccatgacgctattgatggtgtgggttgccggtgaacaatacttcttacggagcaccgattttggcttttcgctgctgatcggcacttctttgctgctgttagccaatattatctggctgatcaatcgctaccgtttttctttcaaagccgctgatgcactggtcgcaggctgctattttgttggtcacttcctgattgtccgctcgctctatctgtaaatatctacgccccacggacggggcgtactggtttcttctttctcctttctgcacaaattcacccgcgcagcaagtccccgtggttaataaatcgaactctatttagcaataattctcatccttctattgactctggagttagctccaaggtgtagagtcctctcatcaacggggaattaactgttccgggggcactatgcattcacatcgcgaccaccaacattcagatgaagttcatgaccacaacaacgaaggtcacgcacatattcatacagccgatacacattgctgtagtgcaacaaatacagcggtcgaagaggtatctcaagctagtaaacactcacattcttccaactgttgcagcagtgccaagcctgatacgtcagggaatgatagcgaattagaagggctacccagcacgggcggtcagcgttatagctggcatataaaggggatggattgcccaagttgcgcgcgtaagattgaaaatgccgtaggcggtatctccggcgtggaacaagccaaggtgctgtttgctacggaaaagctggtggtagatgccaaaactgacgtcagccaacaggtacaaaacgccgtcgccaaagcgggatttagcctgctggacagccccaaatcagggcaaaaaatggcggccaatgaaaataagtttcgcgaatatttaccaataatcgtactgacgcttttgatgttagccagttggggaatttcattagttagcgaagaaagtggccgcatcgcctttatcgtcacaaccgtggtgggattaattcctatcgccggtaaggcactgaaactgattcgttccggcacgccttttgccattgaaaccttgatgagcgtggcagccattggcgcgttatttatcggcgcaacggcagaggccgccatggtattgctgttgtttatgttaggcgaactattagagtcttacgccgccaatcgtgcacgacgaggcgtttcagccctgatggcgctagtaccggaagacgctttgctactcaaaaatgggcaacggagtctggttcctgtcagcagtttacggccaggagacgtaattgaaatcgcgccaggagcgcgtctgccagccgatgcagagctggttacaccttttgccagctttgatgagagtgctttaaccggcgagtcgattccggttgaacgacaacaaggtgaaaaagtggcggcaggcagcctttccatcgacagatccgccgaaatgcgcgtaatttccgagccgggtaataacgccattgaccgcattttacagttaattgaagaagcggaagaacgccgcgcgccgattgaacgctttatcgatcgctttagccgcatttacactccattaattatgctgctgtccgttttggtgattttgattccacctatgttctacggccagccttgggaaccttggatttatcgaggtctaaccctgctattaatcggctgcccttgtgctttggttatctccacgcctgcggccattacttccgcactggcggcggcaactcgtcgcggcgcgttgattaaaggcggagcagcattggagcaacttggcatcattcaaaccgttgccttcgataaaaccggcacgctgaccgaaggtaagcctcaggtgaccgacgtactgccggtcaatggcgtgactgaaaatcgcctgttaacgctaaccgccgccgtagaagccggttcccaccatcctttagctacggcaattttacagcgcgccgcgcaggaatcgacttcgctacctcccgcagaggaacgtcgggcgttggcaggtattggcgtcgaaggggtcgttaacggcataaaaatattggtgagttctccgggcaaactggctccacaatcgctagataaccactggcaaacacaattggatcagttggaaagcagcggcaaaaccgcagttgcggtgctggaagaggggcgctttattggtctgctggcgctgcgggatactctgcgcacagatgcaaaacaggcgattaatgcgttgaaaaatctgggtattcagggcgtgatgctgaccggtgacaatccgagagccgcagcggcaattgccaatgaactaggcatcgactatcgagctggattattacccgcggataaagtagaggcgatcaccgcgctgaataaggctaaacccacggtcatggtcggtgatggcataaacgacgcgcccgcgatgaaggccgccagtattggcgtcgctatggggagcggaaccgatgtggcgctggaaaccgccgatgcagcgttgacccacaaccggctgaccggattagcggaaatcatcgtgctatcacgtgccgctcgcgccaatattcggcaaaacatcgctattgcgctgggattgaagggaattttcctgattactactttgctgggattaaccggtctgtggctggcagtgttggccgattcgggcgcaacggctctcgttaccgccaacgccttgagattactgagaaaacgcgaaatttaaccgggtagaattttatccgaatattgttcactcccaaggctctgcacgagccttggtttttttcctgactaagccttaatgcccttacgcaccagataacgataaggggcagtctccacttcctgtgccaccagttcatgatccataaagcggcaaaatccgggaatatcgcgggttgtggcaggatcgtcggcgataatcaacaaagtctgtccttcttccatatggcgaaccgttttccgcaccatcattaccggttccgggcaacgtaggcccagcgtatcaagggttttatccggatgggcaaaaagatctgtcattggttttctcttatcagcgattgagcaaattttaatctcggcgggaagtgcccgatgaagggcagctagtttactccgcccattttgcggtgcaagctacgctaacgtttgcgctaaaattaaccattgcattcgttgcgcaaacaagtattatgccgccgcgccgtagaaactgcgggcacattttgtttgggttccctcaccccaataaccaaaaaggtcacatctatgttttcgtttacgccccaacagcggatgaccgctttggtatggctttcgctattccatattgtcatcatcacatccagtaactatctggtgcaattaccgatcgctatcttcggttttcacaccacatggggagcttttacctttccctttatctttttagctaccgatctgaccgtgaggatttttggtgcgcctttagctcgccgcattattctctcagtgatgttacctgcattggtaatttcctatctggtttcagccctgttctttcagggaagctggcagggattccccgcgctcactagctttaacgtgatggtagcccgtatcgccgtagccagctttatggcctacgtattagggcagattctggatgtacaggtatttaaccgcctgcgtcagcgcagcgcctggtgggttgcacctacggcagcgatgttcttcggcaatatcagcgatacgctggccttcttctttattgccttctataagagcagcgatccctttatggcggccaattgggtcgaaatcgccttggtagattatacctttaagctactgatctgcctcctattctttcttcctgcctatggtgtaatgctgaatatgctgctgaaatatttcgccagtagaacggcgtcgcagccagcggtacaaatcggctaatctaccacctgccggttaatggcggcccgcctacggccgccagattcttctggaattccgtgtaatacctgcctactcacaattctttaccgaggagcctgttgcttttatccgctgaataaggtgcgatacgggtcattcagtcaaggttaaagactctcatccagaaggaattcccatgaataagatgaccaaacttttcgccgttggtttattggttaccgggctaagcgcctgcgatgtcaaaaacgacaacaacgttggccagccggtgagtttattggagggtaatatcgccctggttctgcccaccgaatttaccgatcaaagcgataaaatcagcagcccttccagtaataaacgcgtttatgcgaccaaaaacggtgaaaaagccgtagtgatcattttgaatgaaaaagacaccgccggtttggatgtattggctcagcgtttgatcgaacagcaaaaaggtcgcgatgccaatctgcaaatcgtcaccaataaaaccattcaggttgacggcaagccgttgcagcaactggatagcattatcaccagcggcggccagaaggcttattcatcggtcgttatgggtaacgtcgataacaacagcatgacgctgcaaattaccgttccagccgaaaatcaacagcaggcgcagaccgaaactgaatccattatcagcaccctgaagctgaaatgaatgcagataatcccgcagcggagttgtaacgctccctgcggggttttctcaccaaatttgagcgccactgcggcgctctgattgtttacgctaacgcgcgagccagtagcgtaatcggatgctcacatttcttgctggtcgacatttcaatctgccatttacaggtttcacaatccgtaatcaccaaatctaccccgctctcctcaatctgacgaaataacgaagcgccaatgccttgcgaagtggcgtaattctcagatttaaacccataagtaccggcaattccacagcattgagaatccagcgtaatcagttcgacgccgggaattcgacgcagcaacgccagtgtataagcagtccagcccattttctccatatgacacggcgtatggtaagcaatgcgcagcggcaggcgtttcagcggtaattcccgcccctgatccagtaaacggtaaagataacgagttgccagttcaacgcgatcgcgcaccggcgtggtatccacatccaataaatgaggatattcatctcgtagagtaaaagtacagctggaagaagtggcaaccaccggaatatcccgcgtgatgaccgcatctgtcagcgattccagattaactttagcctgctttttagcctgatcgataaagccgttggcaatcaaagggacgccgcagcacttttctcgtttgagcaactgcacgccgatattcattgcattgaaaacgctgattaaatctttccccagctgcggatgattgtaattaacaaagcagccgtggaaaaacgccacctgttcggcatattgttgctgtttagccgcctgctgacgataccagcggcggaaagtaccaaaagagtatttaggcaattcacggcgatgatcgattttcagggctttatccagcaagtgacgcactggttttaatccagtgatagcattcactaccggtgcaaatggcgtcgacaaagagcccattaaatcggtatggcttaaaatagcgtcacgcagttttggtttattactgctgtaactggctttagcacgttgaataatgtcgccgattttaacgtcggaaggacaagccacttcacaacgtttacagttggtacaatatttcagcgcttcgtcatacagcatcggatcttttaatcgcagacgttcgccatcaggccctgcctgctttggccccggataaagcggattgaccttggctaccgggcaataagtggtgcataccgtacatttaatgcagctttcgaagctgttatcccgcggcaaactcatagtttaacctccgtggcatcggtaatctgctgagcagcgaacaaagcactggttaatgacacaccggcaccgcagccttgctgtagggggtcatagccgcccaacaccgctccaatcgcataaagattttccaaaggctcgccgccgcgcatagcgcgtaactgcttatcggtctgcacgccgaactgtaggtaaggctgagcatcaaacatgtcgctgcgactccagtccgcccgattactcagagaaagcatatccagccctaaaatgggttcgtaaacccgatcgaatccggcaatcaatccgttgctaaagaaactgccgctcgccagtacgacatgaggcgctcgtagcggaatatctccgtggttacggctatacaagccggtgacacgattaccctcgagttcagctcgtagtaccgaatctcccggcatgactaacccaccaagatgttgaaaacgttggcgtaattcctggtgcagacgcatacccaataacgatggaggcagagtcggcaatagcataatcggcttgccgaccgccagtcgcagggcttccaactgtaccggattatccagaccgatacaggcgggcaataaaatcgcctgagcgtgcgtagacaagcggctcaattcttcagccaagggaggcaggctttccgccaaatccaaaacgcgggcgatattcaccgcgcgaaattcactaggattatcacgcagccgatctaatgccggcaaatgcatatagctggacgtcgccgcgacgccctgcgcctgtaaggaatccgccaccatctgcggctgaaaatcgaggaatccttcaataccgataacggcaattcgctcccaaggtaaagttccgttcaacggtgtagtgggaatttctgcaggactgagccacgttgggcgttgactgcccagcggcgtaatgcgcatgtggttttccgccgcactaccgacaaaagaaaggtggcaacgctccagtaatttctgcgcttcatccaccagttcgatgaccaccgcccccattttgctgtaaggatgctcaggtgcctgtgccgccaaggcttctaatgccgtaagaggctggcgcacttcgctgccatcaggcaactgagccaaaagatcgagagaaccggatgaaaaatgcagcgcactttgcccggcgctgacgatggcgcaagactttccctgctccgccagacgaataccgcaggttagccccgccagcccgccgccaatgataatggcatcaaatttcatcgcttttctcctgcgccgatggaatcgcggcagtctggtgacccagcccgcacagtccttgatatacccaactggtaaattcactttcccgcagcgcatcgccccaggcaattggacggacgcctttccagcgctcgttgaggaattgggtcagttgctcgcgagattgctgtggcgtggtgacattaaaacgatttagtaagccagcggcacgacaggcgcagagttcaccctgacaggttcccatcccgacgcgagtgcgtcttcgtaaatccaataaattgtttaccgtgagcgattcgacggcataacgcacttcacctgcggtcacagcttcgcattcgcataccaggctattatccagccgattaccgtccaataattgagtggctctatctccgtgacgataaaccgcagagccgcgaatactggctggcagagaaacaaccttacgtaaagtctgttctgcggactggcgagaaccgggcagcggctcttgtgccgtggtgcaactggcctgatgccccagtttttcacacactttatccgtcgcccattctgccattaaccggtaagtcattaatttgccaccagtaatggtgataaaaccctccagcccatcgcggctggcgtgatccagcaaaacaataccgcggctaacgttacggccgctcggatcgtcgtcgctggcgaccagaggacgaacgccagcataggcgcgtaaaatgcgggttgccgccagtttcggcgacagtttcgatccttcccgaatcaaaatatccacttcctgtggcgtgacgatcatgttgtctatctggtcataatcaatatgcgttgaggtcgtaccgatcagtgaaatagtgtctcccggcactaaaatatcggcgtcggccggtttgcggcaacggttaatcaccatgttattaatgcggtgccccaaaatcagtaacgcgcctttcgcagggaacattcgcactcgcagatcggcatactcggcaatgtgttgcccccaaatgcctgcggcgttaaccacgattcgggcatgaattttatactggcgctggtttttgtgatcgaaaacgctcacgccggtcactcggtcaccctgacggataagaccaataacttcatgatatgtcagtacattagcgccatgttcgcgagcgtccagcatattggcggcggtgagacggaaagggtcaacggtgccgtcaggtactttaactgcaccaatcatggccggattggccgccggttccattcgcagcgccaacgccggatcgatcgcttccgcgtcaatacccgccaactggcagcgggtgataaattgctgctgatattcgagagaatcttctggcagcgtgataaacaagccattggttggttcaatacagtggcgggcaatacgtttgaggatacgattctcttcaatacattctttggctgattcgccgtcggttaccgcatagcgcgcgccgctgtgcagcaagccgtgattcctgccagtcgcaccggtagcgatgtcgtgtcgctccagtaaaatacagcctaacccacggcgggcgcagtctctagctatgcccgcaccggtggcgccgccgccaatgatgatgacatccgtttcgctgtaaggagaactgttcgtcatgaaagaccccactctatagacaaccgcctggcggtcaattttacatctattgagacacaataattagggtcattgtttgataaggaacaaaaacgaaccaaaaacgaaaaccaaatgatggataaaaaccatgattgtgatcaaagtcacacaggagcacccactttttatttcaaatcgttaaccaatcgctcaaaatcgcacccgcttacataaaactgtaacaattgcgccatccctcacagataaacaacgcgtttttatctagcattgcgctcgttatagaacataaacgataaccaggttggcagttcaaccacccgctagacaccaggctatgctgggatcaaaaagtacgtataacgccattggaggcactcatgttgagtatatttaagcctgcggctcaccaagcccggctgtcagaagatcggattgatccgacttatcgccgattacgctggcaaatatttatgggcatcttcttcggttacgctgcctattatttggttcgcaaaaactttacattggccatgccgtatttgatcgagcagggcttctcccgtggggatttgggttttgccttatccggtatttccattgcttacggtttctctaaatttatcatgggttcggtttccgaccgctcaaacccacgcgtgtttctctccgccggtttgattctggccgccgccgtgatgctgtttatgggctttgtcccttgggctacctccagcattgccgtgatgttcgttctactcttcctgtgcggttggttccagggaatgggctggcctccgtgcggtcgaaccatggttcactggtggtcgaagaaagagcgtggcagcatcgtatccgtttggaactgcgcccataacgtcggtggtggtctgccgccattgctgttcctgctggggatggcctggtttaacgactggaaagccgcgttatatatgcctgctttcggtgccattttagtggcgttgatcgttttcggtctgatgcgcgatacccctcaatcctgcggtttaccaccgattgaagagtacaaaaacgactatccagacgattactcgaaagaagcagaagaagaactgacggctaaacagatcttcatgcaatacattctgccgaataaattgctgtggtatatcgccattgccaacgtattcgtatacctgctgcgttacggcattctggactggtcaccaacctacctgaaagaagtgaaacacttcgctctggataaatcctcatgggcctatttcttgtatgaatatgccgggattccaggaacgctgctgtgcggctggatgtccgataaagtgtttaaaggtaaccgcggtgcaaccggcgtgttctttatgatactggtcactattgccaccatcatttactggctgaacccggtcggcaacccaggcattgatatggcctgtatgatcaccatcggcttcctgatttatggcccagtaatgctgattggtctgcatgcgctggaactggcaccgaagaaagcggcaggcactgcggcgggcttcaccggtctgttcggttatctgggcggatcggttgcagctagcgccatcgttggttataccgttgacttcttcggttgggacggcggctttatggtgatgattggcggcagcattctggcggttctattactgatcgtcgttatgttcagcgagaaaaaacatcacgaagagatggcaaaaaaccgcgctaactaaggctcggtagtcaatctcagcgtttcaggccgtgccgttatctttggcgacacggccttttttgtaccctaaaaccaaaagtggagtaggtaaaccatgcaaactcacgttaaagccttggtagctggcattattctggcctcatcaatggccggagtagctcaggccgcagagaaaattgtcatcgcacatcgcggtgccagcggctatttgccagaacataccttaccgtcgaaagcgatggcttatgctcagggagccgattacttagaacaagatttagtgatgactaaagataatgagttggtggttttacacgaccattatctggatcgagttaccgatgttgcggagcgcttcccagatcgggcgcgtaaagatggacgttactacgccattgattttactctgccagaaatcaaatccctgaaattcaccgaaggttttgatatcaaagacggcaaaaaggtacaaagctacccgggccggttcccaatgggtaaatccgatttccgtgtgcataccttccaggaagagatcgagttcattcaaggattgaatcactcaaccggtaagaatatcggtatctatccagaaattaaggcgccgtggttccaccgtcaggaaggaaaagatatctctgccaaggtgctggacgtgctaaaagagtacggttacaccaccaaaggagacaaagtttatctgcaatgctttgatgccaatgaactaaagcgaattaagaacgagctggaaccgcaaaaaggcatggatttgaaactgattcagttggtggcctatacggattggaatgaaacctatgaacaacagccaaacggtaagtgggtaaattatagctatgattggatgttcaaaccgggcgcgatgaagcaggtcgcacagtacgctgacggtattgggccggattatcatatgctagtggcagccgaatctacgccgggcaagattgtgctaactgagatggttaaggatgcccacgccagcaatatgatggtgcatccatacacgattcgcgccgatgcgttgccgaaatatgccaccgacgtcaatcagctgtacgacattatctacaatcaggcgcaggttgacggtgtgtttactgatttcccagataaaggcgttcagttcctgcaaaagcaggggcagcataagtaaccaaaatatcagggcgcatttttatgcgccctgtccatcaaaaataagccacttgctcttttgcttgaaagatctgagctaaatagcccttaaactgttcggtaatctgttctgccgcatcattcatatctatataggtggttgccagcactagcccatcagcgacagaaaatatcactttattgccgtagttataggacaaaagttgtagcaaacaatcgtattgctgaggcactggagcaaacgggcaaatcaattctgcgttatcatcctcagtatcaatataaacaataaattcgtcatttatattaatataattatcttctccatgaggagtggtggcaaaatattgaagtagtaattgcgagctttcatccatgactgtacctatttattataaggagctaatccacgaagttgcttaaccaggtctgtatcatcgacccgttttacggcaacatttttgattttatcaaaagctttactcccttcggtatgcatattagcggcttgaatttgaaggttactgctatttaatgcgaccattttataaagtgctttcccatcaaccgataattccctactaggagagagcgaatggttaaaatgtaatgatgccaactcacgcttaacttctatatcaagtaaagccgtgcgatctttaccacttttacaattccaacaaggcgtcacaccaatagcattggaaagtaacactattcgcctgacaaatttatagggatcaattttattagagtaagatttatcatgccacatttccattaactgcctcgacagttctctaaccaattttatattattatcatccggtttatttttcgtattaataagataatcgcccacccagccgcctggtttagagatgtccagctcatcacctagcattaattttatagagggttcattgtattgatttgaaacctcccaagacttattctttggaataccaaatccattagggaatataggtagaaaggccattgaattaacgccaaagttaaatgcggccaactgtaaattcattttaatttcttgttgcttcccactcgcgtcgcgtatatataaaactaatggcttggattctgacaatgttttccaagcgcccatctgtatcgttaactgagtcccttccgtgtccttcaaaaaatcctgcgccgtcagtaagctagtagaagttaaccgcaaatcaatcgtctctccattcagagccttttgcagcttttctggatgctggaacaatgcggcaagaacgacttcgcgtccgcgttcaagcgctatcgattgactgtcttccttgctaattttcacgctatgcggaccaagagaggcatgtcgaatcccctcgagcaaaatctctggccgcccgttcttctgtaacgaaaacttagacacccacaaattaactgcgtgctgagaattaccgctatcagcagaacaaacgccaccatttttataactagtggggaatatgtcatcctctccctgctcaagtttcaattgaccggcaggtattgactcactaataaatttgcatcccaaatagtcaaactgagacttttgtatattccactctgccgtattcaataatctgatactggcttgtttaaattcccgcttagcattctctttggctaacttagcgttcattccttgttctttataaaattgagtgagaacatccataacttctttcttacagtgtttaatactgtcgtattcagcattgctaatgggctggttttctaatgacgtaggattttttaaattattctttttaaattccaaatccattgtggcttctaactttccataaaaaccattggaatcatcatctttcaaaacatccagagccactttgatataatctaattttaattggcgagtgtctttagcataattcaatatatgatctgaaaatgaactttcttttgatttatctctggcatgtttttttatcgtcatgcttttttgttcaaatttatctatcgctttatctttcgcctgtaggtcaccctcaccgtttcttatataatgttgacaaagaatatccacaatttcattctcgtgctgtgtaacactaatatcattagtaatatcagtcgatagttcgaacgatggttctatatctcctaattcttttgaaatggtatttatctttttgataaaaggcattttttcgagagaatagccagtggcggatttatcattatccgggatcaacacctcaagagctatatccgcatatctcaactttagctgtctgattgaactccttattgtatcaaccgactctgatttcttctgatggatatagctaacaccagcaatattttctggcttacgcggaggtgaagaaccaaaccctaatattttcttgttctcactcttttcaactttatcatatgaatgattagatttagttacattattatttatcgcaaagtcgtttgacataggacctccacacatcaataaatgcaaaacaaactatattgcagttaataatgtttttttggttcgagtggaggatataacaaaacaattttataagtactgagaagggaaagaaattcagggcgatagaacatcgccccgtttgagcgttaggctaaaaacattttacgcagatagtgcggtactgcgtcgtcagcgtttgaacctatcacttccagatccggtaaaatatctttcagacgttggtgagcatcacgcatgatgcaacccttaccggccatcgacagcatttccaaatcattcattccatcaccaaaagcgatgcattctttcagtgaataaccgataattttggatacctgctccaatgcatggcctttagacacaccgccgcccatcacttccagacaggttgggaaggaaaaactgacgttcacgcgatcgccccaacgagcattgatggcttcctccaaaatcagcagcttatcgtgatcttcgcaggtgaaatacaccttgcacacgccttcggtcggcagtaatgcaggttcgaatagctgataggtgaacaccgattcacggaaaaactcttcctgctccggactttcgcgattcatataccaatcgtcgtttaaataaacgttggtcagaatatccggattatcgtgctccatgctgtatagatcgcgggcgatatcaccatccagattatggctaaaaatcagctctccggcggtgttatgtacgcgcgcaccgttagaggtaatcataaaggcactgatctccagactatcgcgaatctgtgacacatcaatatgatggcgacctgtagcaaacacgaaatgcacgtcacgttcggtcagtagcttcaatgtctctttagcgtaaggagtcaaaatgtggtcaggggacagcagggtgccgtctaaatcggaagcgacaacatgatacatagcggtatgttctaacctctggtggagttggcgtcagcgtcgacgctcagttgatgatgttgcgcaaaaaaacgcaatatggcgcttaacgcctctacacgcagcttgtcccgctcgaacaggatctcatggcgtgctcctttgatgactctgggagcgcccccgtcacagggatgcccagcctgagccattacctgacaaaaagcgtcctgagccgggtttgataccacccgatcttcactggcctgcaacaataatattggcgtggtgattttatctgcctcggcgattatctgctcgctggcacgcaggctttccctcacccagtgataggtagggccgccaacgcgtatttctggcgtatccgcgtagtgacgtaggcagcggcgatagcgctcgcgactgtgggtcagcatattcactacataaggcaatggccgccactgaccggtgccaatcgcgtagtaatcccgcatgttctggcgcttttcggcccaatcgacaatgcggtgcgccagccatttcggcataggtagatgaatacccaacatcggtgcacaaagcgccgcagcatcaaacgccgtcggttcccgggccagatagcgtagcagaatcgcactgcccatcgagtgagccagcgcaaaacgttctagataatggctattactgatttcccgctcgacccactgagcaaaatcttccacatagtcatcaaaattaacgacgtggccacgattaggatcttctagcattcggccagaacgcccttgaccacgatgatccagcaccatgacgtcataaccttgctgaaacagatcgtaggcaacttccggatattttacgtagctttcaatgcgacccggaaccaacatcaccactttgttgtgatgaggggaacggaagcgaacatagcggataggtacattatcgacgccagaaaactcgtcttcttcccgctgctgccagaaatccagcaaaggcccgttagcaaaggcggcaaatcgcgcttcacgggttaaccagttttcagtttttttctctaacggcatagggttgttaattgcatccttaaaccggcgtcctgtggtttttccgagctatagcagatctaaaaacaatagcgtattgtggcataaatttactcattcagggaattttgccgatgaccttcgactggtggctaacctatctggtgacaacctttatcctcagcctgtcgccgggttctggtgccattaacaccatgagcaccaccatcagccacggtaaacgcggtgttgtcgcatccattgccggcttgcagcttggcctggcgctgcatatcgttttggtcggcattggtctgggcgctctcatttcccaatccctgctggctttcgaaatactgaaatggctgggagcggcctatctgatttggctgggtattgtacagtggcgagcggctggcgctgtggatcttcatgcgcttgccactagtctgcctcggagaaaactgttcaaaagagcgattttcgtcaatctgaccaacccgaagagcattgtttttctggccgcgctgtttccacagtttgtattgcctcatcagccgcaggcggcacaatatctgattctgggcgcgactacgttgatagtggatatcatcgtgatgattggctacgccgcgctggctacgcgaattgctggttggattaaggccccgcaccagatgaagttgcttaaccgtattttcggcggtttatttatgctgataggcgcattgttggcgacagccaaaaaagtgtagccgagaagtgaatatctggccggaatactagtgatccggccagtaagggttatttcgaaaatatcagatgcaatccgaaaccaacaaataatacgcccgccaaaccatcaatccatttcgacaaacgctggtaaccgcggcgcatcaccggcagggcaaatacacaggcaacaacgctgaaccagataaaggtttctgcaacgatcaggataaacaatccccaacgtgcgccagcgctgacgtcatctccgacaaacagcgagaatacgctgccaaaatagatcaccgctttcgggttagataagttggtcagaaagccgcgcaggaaagtacggccgcggactggcagcgtcatttctacctcgccttcccccagctcgcctttggccctggctgatttcagcaattgccagcccatccagcacagataaagcccaccgccgaccataataacctgatgcagccacgccattttttgcagaattaaatgcagccccatcaaggccacgcctgcccaaaccacaattcccagagatattcctaccacgcccatcattgcttcgcgacgggaacggctggcggcagtttgagaaacgaaaaagaagtcagggccggggctcatcaaggcaataaggtgaaccaacgccacggtaagaaaaagcatcaacatgaagataatccgacaggaaatgagagaagaaaaaccactgtatcacgaggacggcagcccaaccagactgccgtttatgctttatattcaacgctggcaggcgctattcatcgttatccacatgatcgcgaatcatcgccataaatggcgcgccgaaacgttccagtttacgctgccctacgccgttgacgctgagcaattcgctggccttaatcggcatctgctccgccatttccagcagcgtcgcatcgttaaagacgacataaggcggaatgttttcttcgtcagcaatggacttacgcagtttgcgcaatttggcaaacagtttgcgatcgtaattgccgccgtaggacttctgattagcgctgctgcgcggtttcaggctttgaatgcgcggcaccgccagttgcagcggaatttcggcacgcaaaataggtctggcggcctcggttaattgcagggcggaaaactgcgcgatattctggctgagtaagcctaaatggattaactggcgcagaacgctcacccaatgctcatgggtttgatcccggccaatgccgtacaccgaaagtttatcgtgccccatttcgcgaatacgctgattattcgctccacgcagcacttccacgatatagcccaaaccaaagcgttgcccaacgcgatacacgcaggataaggctttttgagcgtcacccagcgcgtcataacgtttcggcgggtcaaggcagatatcacagttgccgcaggcctgttgtttcccttcgccaaaataatttagcaataccaaacggcggcaggtttgcgcttcggcaaaagcccccatggcattcagtttatgacgttcgacgtcctgctgagcaccggcaggcttttcttccagacagcggcgcaaccacgccatatccgccggatcataaagtaaaatcgcttccgcaggcaggccatcacgcccggcgcgccccgtttcctgataataagattcgatagtccgcggaatatcaaaatgcaccacaaaacggacgtttggcttgttgatacccatcccaaaagccacggtggcaaccaccacctgtaaatcatcgcgctgaaacgcttcctgaacctgggcccgtcgttcgttatccagaccggcgtgatacgcggccacgctcaggccgcggctttgtagacgcgcagtggtatcttcaactttagcccgactattgcagtaaataatgccgcttttaccacgttgatcctgcacaaagcgccagagctgatccagcggcttgaacttctcaaccaaggtatagcgaatattgggccgatcgaaactgctgacctgaatcagcggctgattaagatccagcaaccgaacaatatcgccgcgcgtggcttcatccgccgtggcggtgagagcaataactggcaacgcgggaaaacgacgtttgagctgacccagagcgcgatattccgggcggaaatcgtgtccccattgggaaatacagtgagcctcatcaaccgccagcagcgccggacgccaatgctcaagctgttcgaggaagttttccatcactaagcgctcgggagcgatatacagcagtttaatctgaccactgcggcaaccttccatcacggccagttgctgctcgcgagtttgtgatgaattgagacaacccgcggcgacgccgtaggcctgaagttggtcaacctgatctttcatcagtgaaatcagcggagaaaccaccagcgtcaagccatccatcaccagcgccgggatctgataacacaaggattttccgccgcccgtcggcatcaccaccagacagtcctgcccggcgagcgttgcattgatgatttcttgttgccctggtcggaattgttggtagccgaaagtctctcgcaagacctgcgctgccagctgttccttatttatcactgccgcggtagacactcgtttccccaactcttggatctgaacaggccggttaaccggcctgtatgtgattctgcactcacgccaaacggcgttacatgacgtcgttcaacatgatacccacaccgacacgggtttgcctaaagttatagtcaatcattgactcaccgtagccgctgaacacctgtgtgtagaagcgaacatgcttggtgatggggtaactccagcccatttcagccgcgccgtagccggaattccagttatagcgcccttccatgctaaatacactatcgccccaggcataaccgactttcaggcggtagtaacccaaatatttagtgatatctggattatcatcttttgcatcattttccgagaagcgataccaaggtttcagatctatctcccaatctccgcgctgcgccatcacgcgcgcataggcgcgatcccagctacgagaagttgggtctgctttaccgttagattggtggttcaaacccacttctatttcgcggaaagtccagcccgcaaagtcataatccgttgcccaggccaggaatacctgcggctcatagttagtttcgcggaatggcgaagattccccgctgttcgaagcctgccaccacgaacgctgagtgtaggatgcgcccaacagagagttttccccggcaatgccacgccagatagggaaccctaagctcagttggaatttaatctcatctttacgggcattttcggcccaatcataggaactaatggcttctttattgatattgctggagtaggtataaagcaggtaattggtttcgtacggatatagcaggaaaggattatcgtggtcttgcagcatggcggcaataatacttccacgaatcgcaggcgcatcatgaatcttttctaccttggcttcctcagcctgtgctaaaaccggcacaaataacaataccatcaatattcgccaaaagtgtcccatcattactctcatcgcctcatagattattcgtaattttaatgaaaagcagctcattctacacacaaatggcagtctggcttagcgttgtttatttttatgaatccgtcactagcgcgcaacaagttatgggcataaaataaacatttagttaacagccgccgtattattatcggctacgaaagtgagaatcaagccacatgtctggaaccatattaacccttgaagaagcgcgccgcttgattggcgaagtttttgtctaccacatgccgtttaatcgtgagctaggtctggaattacgccgctttgaacaagattatgcagagttagcctttagtcatcaggatagattagtcggaaatatcgctcagcgcatcctgcatggcggtgttattgcttccgtactggacgtcgccgccggtctggtctgcgttggtaacagcctgacacgttacgaacccttgattaaagagcagttacagcaacagctatctaaaatgggcaccatcgatttgcgcgtggattatttgcgccccggccgcggcgagcatttcaccgccagcagcagcattctgcgcagcggtaataaagtcgctgtcgctcgcgttgaattacataatcaggatgcggttcatatcgccagcgccactgcgacttatttagtcgggtaattgtcttttttcagtgagtaaacgccaatgatgcttagctacaacaagttaagtacactcaccgtatcccttttttgttcagagctattccatggataagcaacaaacgcgtcagggcattttctttgctctggcggcctattttatttggggtcttgccccggcctatttcaaattaatccagcaggttccggcagatgaaattctgacccataggattatctggtcattcttttttatgctgattctgctcacgctgagtcgcaattggccacaggtacgccaagcctgtcggaataaaaaacgcctgttattactggcggtcactgcactgctgattgccagcaactggctgctgtttatttgggcggtcaacaaccaccacatgctggaagccagcctgggctacttcattaaccccttggttaacgtattgttcggtatgctatttctaggcgagcgttttcgacggatgcaatgggtcgcggtcgcgctggcgtttggcggcgtgcttattcaactgtggcagtttggctcgttaccggtgattgggctggggctggcgataagcttcgcgctttacggcttattacgtaagaaaatgggcatagacgcgcagaccggcatgctggtagaaacgctgtggctgttacctattgccgcagtatatttattcttctttgccgatagcccaaccagtcatttgagcgctaacgcctggtcgctcaatctgctgctggccgctgccggtgtgattaccaccattccgttgctgctgtttaccgccgctgccggccggttgcgcctctctacgctgggctttttccaatacctcggcccaacgctgatgtttgtcctagccgtcactttctacggtgaaaccatcagtaacgacaagatggtgaccttcgggtttatctgggcggcgctgctaatattcacgctggatgcgctctatacccaacgtaagttacgcaaataggctgcgacgcccgatgtagcctcatcgggcgctcacacagtttgggccttacagccagtttttacgtttgaagtacagataaggggctaaaccggcgacgatcatcagaccaatagcccccggatagccgaatgaccaacgcagttccggcataaattcaaagttcataccgtagctcgaagccaccagcgtcggcggcaggaagaccacggagaccaccgagaagattttgataatccggttttgttcgatgttgataaagcccatcgccgcctgcatcaggaagttaaccttttggaacagggattcgttgtgcggcagcagggattcgatatctcgcagcacttcccgcgcctgctctagctgaccagtaggcaaacgcgctttacgcaccaggaaattcagggcgcgctgagtatccatcagacacaaacgcaccttccagccgatatcttcctgctccgccaacgtggacagcgcggcatcgtactcatctccctgatgcccttccataatcacgcggctaagcgcttccagatcgctgtaaatattctctatttcgtcagccaactgctcgattttggtttcaaacaagtccagcagcagctcataggcgttaccgtcgaccaacgtctggttgcgggcgcgcatccgatacaggcggaaagcgggtaactcgcgctcacgcagggtatacaggcggccatcccgaatggtaaatgcgacggtggagttaccagcgtgatcttcggcgtcttcaaaatagaagaatgagtgaatgtgcaaaccgtcttcgtcttcaaagaaacgagcggaagcctcgatatcatccagttctggccgggtcgccaaactctgccctaactcacattgaacacgctcacgctcaccttcttctggctccaccagatccacccacagcgaggtagtcagatcttcggattcatccagctccagacgggataagcgattgttctctaatttaaatgcgctcagcatgtgccataactcccttggggaatggatagagattacgcattgaagcacagaaacaaggggatgtcgttacatcagcaagtttcagaccataaggagatctgactcacagcgacggtcaaacgaggtcgctgacaaccacgaaggctatcagcaaaagaggatagccttagaagttgcaccatatgaacaggttattgagccagcatctactgggtgtgtccaaggcgaatgtcctcattaagaatagtgcgcgcatgttacgctgagaagaaaaaggctgtcaaccgctacgccgcagttagtcgcagcctgagattcatcctatttcctggcaaatattgttgtcagcgtaaacagatgataaacggcagacttaggctaatcactctggcttatatctgccttccgcttcggctacattgggcgctacgcctcaactggaataacggtaaatgaaacaaatcactcgacctatgctggcacaaatgagcgaacaggctagacaactcagccgtttgcgcactcatcataattttcacccggaactgagcgattccgtccagcgtctggcaatagccatggagccactaacctacgtgcgcccacatcgtcatccacatacctgggaagtactaactgccctttccggacattttgtggtgctgttattcaacgataatggcgaagtgacagagcgggtagtactgggaaaagaagcgaccattctggagattcctgccaatacttggcacgcggtgctgtcgatggaagaaaatgcagtgatttttgaggtgaaactcggcccctatcagccagtcaacgcggaagatttcgcgccttggtcaccggcagagagtgaaccagaagtcgccaatatgctggcatggtatcaaacgactacggtcggcgagcgttattccgcttaactatttgatttaaaaatgatgaaaaaaaccggagttatcattagctccggtttttttatgctgcaacggcgaatgatggcttataccgcttccagtctcgcataggctgcaaccagccatttaatcccttcgcctggaaaagcaatttgcaggcggctgtgctcgccgctgccttccagattcaccaccgtaccttcaccgaatttaggatgacgaactcgctgacccagagtgaaaccgctgtcgttttcattcattggcgtccccatacggcgatgatttaccggacgagaaacgctggcgcgtagtctgacttcttcgatacactcctgcggcagctcaccgataaagcgggatgggcgatgattgacttctttaccgtacagtctgcggctttccgcatagcataaggtcagtttttgcatcgcacgggttaagcctacgtaggccagccgccgctcttcttctaagcgtccaccttcatccagcgacatttggctcgggaacatgccctcttccatacctactatgaatacctgcgggaattccaaccctttagctgaatgtagcgtcattaactgtaccgcatcctgataggcgtccgcctgcccttccccagcttccagcgcggcgtgggacaagaacgcctgcaacggcatcagatcttcatcctcgtcctgataactgtactgacgcgtggcgttgaccagttcctcaaggttttcgatacgagcctgacctttttcgcctttttcctgctcatacagggtccacaggccggaatcgcgaatcacgcggtcggtttgcacgtgcagcggcatatctgctgtttcgtgagccagtgaatccaccagttccacaaaacgctgtaaagcagaggcagcgcgccccgccagcactttttcctgcaataacgctcgagtagattgccacagcgtaagctggcgatcccgcgcagtctggcgcactacatctagagtacgatcgccgataccacgggttggcgtattgaccactcgctcaaaggccgcgtcatcgttacgattggaaattaagcgcagataagccaatgagtctttgatttcctgacgttcgaagaagcgctgaccaccataaatgcggtacggcatcgccgtttgcagtaaagcctcttccaatacgcgagattgggcgttgctacggtacaaaatagcgcagtcgtttaacgcaccgccgttgtcttgccaggctttaatccggttcaccacaaagcgcgcttcgtctaattcgttgaaagcgcaatagatcgaaatcggatcgccttccacgccgtcggtccacaggtttttccccattcggccatcattgttggcaatcagggtattcgccgctttcagaatattactggtagaacggtaattctgctccagacggatggtttccgcgccggggaaatccttcaggaagcgttgaatattctcaacctgcgcaccacgccagccgtaaatcgattgatcgtcatcgccgacgatcattacgttggaacgatcgcccgccagcaggcgaatccatgcatattggatgctgttggtgtcctgaaactcatccaccagaatattggtaaaacgttcacgataatgattcagaatatgcggtttattcagccacagttcatgagcacgcagtaataactcggcaaaatcgaccagaccggcgcgatcacaggcttcctgataggcctgataaatacgcagccaggtggcttctaccggattaccgtagctttctacgtgctgcggccgtaaaccttcgtctttcttaccgttgatgtaccacattgcctgacgcggcggccactgtttttcgtctaaattcaatgccttaacgatgcgtttcagtagccgatgctgatcgtcgctgtcgaggatctgaaagtcctgcggcagattggcgtccaaatggtgtgcccgcaataaacggtgcgccaacccgtggaaagtcccaatccacataccgccctggctggtaccaatcaaatgttcgatacggtgacgcatctccgccgccgctttattggtaaaggtcacggcaataatggaatagggtgaagcattctcaacggagagcagccaggcaattcgatgcaccagcacccgggttttaccactgcccgcaccggccagtaccaacaggttgcagcgcggcgcggccacggcttcacgttgtttttcattcaggctgtcgagcagatcagaaacgtccataggcaccgtttatcgggtaagggaaaaccgcgctgtcgcccggtttgaccggacgaccatcagcattccactgggaatttatacagagtaattgataggattataacaatgctgtgagagatgccaactgcgaaatctcaatatgtggcagtaaacgggcatcattgaccgccatgatatttttctgccgatcgttaatccagcaggcctgcatgccgcaacgcagggaaccagcgacgtcggtggtgagatcgtcacccacgtgcaaaatgctttccagcggcaaatccagcttattggccgccttttggtacatatcacgataaggtttggcacggccattggggccagagcgcagcacaaactggaaatagcggcttaaaccgcaggcggcaggatcggcgttaccgtttgtgatagccaccagcgggaagcgttctgacaaggtctccagcgtatcgtgagtcgccgcaggcacatgaatacggctacgccacagggcgaaattctccatcgccgcgtcagcacctttacgggcttcatctttggtcaggccgtggcgaataagacctaactccaacgcctgccaacgccactgggtaacatcgtgataaatatccggatcgctggccagcagttcaatgcgaaaacgatgaaaatccgccacctcaagctggcgtaaattcggatgatactgttgcagaaacgccaccgattcctgttcggtacgggaaatcaccgggcggttgtcgtacagagtatcgtccaaatcgaaggttatagccgcaatcggctgtaatggtcggtaaaaatgcatcaggatttgcctcgtttggctcgcggatgggcggcatcatacaccgttgccaaatgttgaaagtcgagatgggtataaatttgtgtggtcgttagattggcgtggccgagtaattcctgcaccgcacgcagatcgccgctggattccagcatatgagtggcgaaagagtggcgcagtttatggggatgaatatggctgctaacgccttgttttataccccattcggcaaagcgtttttgcacattgcgcgcagaaatacgcttaccggtattggcgaggaaaatggcgtcatcggcgggttcaaacaactcccgtagcgctagccaatgctgtaaccaagtcaccgccgtagcgcccatcggtactttacgttctttgctgcccttgcccatcacccagatttcgccactggccaaatccacatgtttgcaatccattcccaccagttcggctaaacgtaaacccgcgccgtacatgacttccagcatcgcccgatcccgcaccgccaaaggatcgttaagatcgatgtccaacagtcgactgacttcatccacatcaatattttttggcagatggcgccccgtcctcggcgtactgacgcctttggccggattggcgtgtaacacgccctggctgaccaaccaatcgagaaaactgcgtaatgccgacaggcgcagcgccaggctagaagactgtaatccagcacgcttgctgcgggaaaccagcgaacgtacctgcgccgcatccaaactctcccactggctcagccccatttgacccgccagttccatcaccgcctgtagctgtcgagaataactggttatggttaagggactcagttgccgttcaaccttcagataacgcaaaaaggcttcaacggacggagagagcgtagcggggatttcactcatactcgttcgatccagcgctccaacaaggtaggcaacatcagcgctaactgatgcagcatcaccgtacccataccctgctgataatgttgtgtatcacggctactaaagataaccacgcccaaatcgccattcgcgcccatcagggacatcgcaaccgagccgacctgtttagcctgaggcaacagcaacaaaagctctggcccatttaggctgccgaggtaatgacgctcatcccccaaacgctgaatgcgcatcggttcaaaagcgtggcgtgctaaacccagatgagtgaaatcggaaggcgcgccaatatgccagcggtcgttaaacaggcgcacattggctcctgccaatccaaaatcccgcgcccagcgctgtaggcgattcagcatatcttgcaggctttcggcggaggtcagattagtttgtaactgtaacagacggttaaacagcagctcattcagaccggcctgctccatcaacagggtaatttcttcttccagttgatgaatctgattacgttgacgagccagttgccactcgaccagagacacgctgcctctgaccggatggggaatttgcatctgttcaaccaaacgggcattacggataaagaagtcgggattttgcaataaatactgcatgacagcgtcgtcgtctaactcaatgccagccagcgcctgttcctcataattcttcattcttcaacacccatcataaatgaataaaaccgtcgtagacgtgggtcgcaggcccggtcatatacaacgggtgacccggtcctttccagctgatatccaggctgccacccggtagctcgacgtgaacctcttcactcagcaatgcctgctgaataccgactgccacagccgcacaggctccgctgccgcaggcttgtgtttctcctgcgccgcgttcgtagacccgtaaacgaatgtgttcccgactgacaacctgcataaagccaatgttggcgcgctcaggaaaacgctcatgattttccaatactggacccagcaactcaacgttggcaaccgaaacatcgtccacttgcagtacacaatggggatttcccatcgaaaccaccccgcacagcaccgtgtgctctgccgcgcgcaaaatgtaggttttttcagcttttatcgctttaaacggaatcgcctgcggctcaaaattaggttcacccatattgacgcacaccagctcatcctccgtcacgctaagcaccatacgcccagtttgcgtactgacacgaatatcacgcttgttggtcagccccttaatccgcacgaaacgagcgaaacagcgggcaccgttaccacattgagagacttcgctgccatccgcattaaaaatgcgatagtggaaatccagctcaggatcgtaaggcggttcaaccaccagcatctgatcaaagcccacgccagtgtgccggtcagccagtcgtcggataagctccggcgaaaaataaacattctgtgtgacggcatcgacaaccataaagtcgttgccaagaccgtgcattttggagaactgcatatcatgctccactgactactggctaaatccggacgcgataaagcgatttatcgcagtaagcatctggcctccaacagcaggaggccaacgtcaaactgcggggagaatctgggttactgtaagccgccgatagactgagtctgctgcgagccaacattatcttcttggtttttctgcactttgcctgaatctggcggtacagtttctgtctttgaattttccgcaggagggaaataaagtggcccttttaagccacatccggatagccccaccaacatcatggcgaccagcggccagcgtagttctcttttcattgcattaatgcctgtaattcatgcgtccaaggtctctataatcgcaggtggatcatgaaaagcaataggaattgaatatgaacgacagcgagttccaccagttagccgatcaattgatgtcaaacattgaaaatgcagtggataattttgatggcgacagcgatatagactgtgaaactaacgggggcgttttgaccctgactttcgagaacggcagcaaaattgtgattaaccgccaggaaccctttcatcaggtttggctggcaaccaaaaccggtggttaccattttaactatcgggaaaatgaatggcactgcgaccgcagcgggaaaactttctatacgctgctttctgaagccgccacggctcaagccggtgaagaggttagcttcgactaacctttattccagcgccggccagtaagaatcggtaaaaggacacaaaacagcgtgtcctgatttccggtttaccaatgacgtttaacgataactagtgcagctgaaactgttgcggcggcgtggaagactctttttccgtcgcgttatgacacagatgagaaagcgtagtgctgcggaacggaatcacctgagtgcgcccgtctaactgcacaatctgatagaactgcggcaggttaaagttaataaagctggagccataggtgaaacgatcgtgagacgatgagtagaagcggctgacatcgcgcaccaactcttctttactgccttcgcaatgatggtaaacctcaactctattgctctcgtcgagaatgtagatattgaagcctttcccatcgctagtgccttcaaagaagaactgaataattccttcactagcgaatccgtcgacaaccggcggtaaatgaatctgatcggtttctacctgaatcgacaggccatgcagcttgttattggaaatggcaccgtagaattccaccgcattttccagtttctgcaccgatacactaagacgctcgaagaacagcccccaggtctgcccggcgactcgaaccgctttaaagcgacccggttcttgacgagtgctggaaaggcgcagctcgatgcattcggataccaattgttgaatgcgggtgcgaatcagcccgcgtaaatgctggctgtagcagaatacatcaacggattccggcggcgcggcgtcctgatgcattttgcctaaaatggttttcaatgcctccaataccgcctgttcgccgctgaaatgcagggttcgcacttcgttccacgagttgcgatacagtaaatcgatactgcccaccagacactgctgttgctcaccgaaactgaatacgtccagttttcggaaatcaaaatgcacaatctggttgcggaaagcggccgtcggatcgttttccagattgacgatgatcgccagatggcggatttcgcacgggctgtacagcgctttcggcgtcggcgcaggcaaacgcaatgggaaatggtgagaaacatccgtcaccagttcttgcaattttaccgtatcgcacaaattggcgcttttaatatgtaaatgcgtttttgacgtcagtaagccgttgaaataagcccaagccaccagtttgttcagatagcggttatattccagcggctgatggctcactatggcatccatagacggagcctgattatacaaataccaaccgggccggttagcgcgtcctgccggtacgtgaataaaggtcaaatgttcttcggacagatccggcgagatttgtgggttaactaaagtaactttacccggtagcgcctcaaaggccgcatagagtttacgggtcaataccccgatatcctgcggactggcactaacgctcagattattacgacgcgcgaaacggatcagattgcgataactctgcatcatcgcatccaacagctcgttatgcgcttcacgcacccgctcaattttccagttggcgcgattgtccagcatttccagacgctcttcgctccagccccactcactaaccagttggctcagtatctcccgacgccaaccgctgctggccggcgttttagacagtttttcgcaaactttcagatagaaacagcggcggactaaatccagacgagtagtatcttcgatttgcgtcagataacgcgtgacgcgatccagcatcatgcagtagccatccagaccgaatgacacaatctcgcctttatgcagacgctgcttgatttccatcgccagcagctgagaattcgggtattcccacgaatacgcttccaacagcagcgttttcaagacggctttgtagggtgaatcaatactcttatagagctgccacaggctggctccgaaatactcttcagccgatagggtactcaagccaccgagatccagccattcatttggcgtcagcgcaccttgggcatataaagaaagcacgtaatcgtcgtaatggccttcttcttctatcggcaccatattccacagaatacgtttccccgccaggcgcactgcgctgcggtagaactcgtctaataacagaatatgttgcgtagaaccgcagtcttcaccgcccaaactgccgctggcattgtggcggaaacggttttcgtcgatcaggaaaaagctgacttcgacgcccatagaggccgcccatttctccaattggctgcatttttgttgtagctgattgcgttcttcgttatccagccaggcttggtggcacacccaaatgtccagatccgaagtgctgctttgcccaatagaagaggtactgcccatggtgtaaacgccggtgatcggcagttcgccttcccgcgctaattgcagcggttcaccccatttgctttcaacttcagtaatatactgttgttgggtttccgtaggcgtgaagaaacagacgccgtggggaacgttaccatcaaggtaacctggcatcagtgggtgatgataatgtaataaggttggcagcagactgtagaccttttggaaggctggccccatggccgccaaggcgcgatcgactcgtaattggttgatcgcatccagtcgctgtttcagtgtctcgatgtagaggtacaagacgtctcgcctgattgttccagtgcctagaaaaaaacccgtgttcccgattcgcctttagtttagaagaatatttaacgaattattgctggaaacgtgatcaatctaacaccttgccgattgaccgtaaagaaagtaaagctatatgcgccattctaatacttacccagccaccctatccagccgtccatttgttaccatagcgtctttcttgcacggttatccgcctgaatcctgtggcttctacactgacagttttcccttctcggtgttaggatggttagctaaatataaaaacggtaatgagcatgttagacaaaattattcgaattgccacgcgacaaagcccattggcattgtggcaagcacattatgtacagcagctgctgcaagcctgtcatccggggctacaggtggagctggttccgatggtgacccgcggagacattatccttgatacgcctttggccaaagtgggtggcaaaggcctgtttgtaaaagagctggagctggcgttgctggaaggccgagccgatgtcgccgtgcattctatgaaagacgtgccgatcgccttccccgaaggattggggctggtcactatttgtgaacgtgacgatccgcgagatgcttttgtttcgaataattaccagcatatggatgaattaccggcgggcagcgtggtgggtacttctagcctgcgccgtcagtgtcagctacgccaacgccgcccggatctgatcgtcaaagatttgcgcggcaacgtaggcactcgtttgtcgaaactggatcagggcgactacgatgccattattctggccgtcgccggtttaaaccgccttggtttgaaagaacgtatccgctacgccatgagtccggaagaatccttgccagcagtcggccagggcgctgtcggtatcgaatgccgtctggatgatactctcacccgcgaactgcttgcgccactcaatcaccgccagactgagctgcgcgtgtgcgccgaacgcgccatgaatacccgccttgaaggcggctgtcaggtgccaattggtagctacgcggtgctagaagatgacactctgtggctgcgcgcgttggtcggcgcgccggacggtagccaaatgatctgcggtgaacgccgcggcccatctgccaatgcagaacaaatgggcatcgagctggccgatgagctgctctctcgcggtgccaaagaaattctggcgctggtttatcaggataatccgccactatgactattctggtcactcgcccttctcctgccggtgaacagttagtcagccgcctacgagcactaggtcgggttgcctatcatgcgcctttaatcgatttctctccgggccgagatttacctcgtctaccggaaatgttggcagaaatgcaggcaggcgatctggtttttgcgctgtcgcagaacgccattcgctatgccaacccgctgttaaacagaaataaactgttctggcctgccgagctatcttattatgctataggtcgctcgacggcattggcgctgcacacggtgagtcgcctaccggtcacttttccgccgatgggtgaaaccagcgaaatgctgctcttactgcctgacttgcaggaattacagggtaaaaaagccctgttgctgcgtggtaacggtggtcgggagctattaggtgaaagcctcgcagcacgcggcgccgaggtcacattttgcgaatgttatcaacgtagcccgatctattacgatggcagtgagcaaagcgcccactggcagcgagccggcgttgatatcctggtggtaaccagcggcgaaatgttacagcagatctatactttaattcctgattactatcgttcttcctggctgctgcgctgccgcctgatagtggtgagcgatcgtttggccgcccttgccagtcaactaggctggaatgacattcgagtggctgagaatgccgataatgacgcgctgatccgcgcgctacaataaacctgactatgggatgcccaatatgacggaacacactaccccatccgccccagtggaagagacaaccacagcggttgagcggccccaacagccagaggctgaaacaccaaaagacaagcgtagcgggcccattctcggcgctgttgctatcgccattgcaattattctgagtgccggcctttattatcagggccatcaacagaaacaacagttggtcgccgccaatcaagcgttacaagaccaactggctgcgttaaaaaccagccaaacgcaggaaaaacagcggcttgaagctttgttacagcaacaaggtaaagcgctagacaccgctgaccgccagcaagcgtctttggctcgccaactcaatgaactgcaagggaaagtcgccaccatttccggcagtgatgctaaagcctggctgctggctcaggctgattttctggtgaaaatggcaggacgtaaactgtggagcgatcaggatgtcctcagcgccgcaaccttattaaaaagcgccgatgcgagtctggcggatatgaatgatccgagcctgattgaggtacgccgcgccattaccgaagatatcagcgcactgtctgccctaagccaaatcgattttgacgggatcattctcaagctaaatcagctttctaatcaggtcgataatctgcgcatggcggataacgtgactgatgatgcgccgatggatgaagacagcaccgaactgtccagctccctttccgattggaaacagaatttatccaaaagctggcacagtttcctctccgatttcgtgactattcgccgccgcgatagcagcgccgagccgctgttagcaccgaatcaggatatttatctacgggaaaatattcgttctcgcctgttggtagccgctcaggcggttccgcgccatcaggacgaagtgtacaaacagtcgctggaaaccatttcaacatgggttcgggcttatttcgacgttaacgacccgagcaccaaggctttcctcgatgaactggaaagcctgagccaacaatcgatctcaatggacgtgccggatcagctaaaaagccagccgctactggaaaagttgatgcaaactcgtgtccgtaacctgctggcgcaaacgcctgtggtcaatcaggagggataagtatgattcgagtcttactgctatttctgctgctgatcgccgggatcattcttggcccgatgctcgccggtcatcaaggctatgtattgattcaaactgatgattacaatattgaaaccagcatcactaaattgaccattatgctggttggattgattttcgtgctgtatctcatcgaatctgtattacgtcgaatgttccgcaccggggctcgcaccagaggctggtttatcggtcgcaaacgcagccgcgctcgcaagcaaaccaaagccgcgctgatcaaactggccgaaggcgattttaagcaggttgaacatttgcttacccgcaacgccgagcacgccgaacagccaatggttaactatttgctggcagccgaggcggctcagcaatgcggcgacgagttccgaaccaatcaatatctggagcgagctgccgaagtggcagataccgaccaattaccggtagatatcactcgggtacgtattcaactggctcaggggcagatccacgccgctcgccacggggttgatcgcctgctggaactggcgccgcgtcacccggaagtattaaggctggcggagcaggcttatctacgcaccggggctttcagctcattgctggaaattttaccggcgatgcagaaaatacagttgcataccgcggctgaaatcagcgcgctggaacagcaagcttatattggcatcatgaatcagtgcatggccgaagaaggcagcgatggattgaagcgctggtggcacgatcaaaaccgcaaaatccgccataatgtggcgctgcaggtagctctagctgaacacctgattgagtgtaacgatcacgaagtggcgcaacaggtgattctagatgggctaaaacgtcaatatgacgaaagactgatcttactgatcccgcgccttaaatcaggtaatcccgatcctttggaaaaagcattacgtcagcaaatcaagcagcacggcgcgacgccattgctaaatagtacgctggggcaattgatgctgaagcacggcgagtgggaacaggctagcgaagccttccgcgctgcgctgcaacagcgtcccgacggctacgattacgcctggctggccgatgcttatgacaaactgcaccgtccagaagatgcggctcaggtacgtcgtgaagggttaatgctaacgctgaaacaaaacggcgagtaaaatcttttactgtgattgagacaggctcctgcgggagcctttcttttatctgccgaaccgcaaactttcctaccggcaaaaaaaaacacttgccgattaagcaagtgtcataaaatatcaggtctacagtcaacagattggtgcctcactcaacgttacgcccggtatgtgatgaaggaggggattggttaccgctcaacatcgtttacgtggacaataggcaccctaaaattggctctgcatcatccctgggtttatgaagactaagctgtcataagaagtgggatgagcatctacaagatagatattgcacttcccgtgccaacttatttaatctcttgaacgttactgtaaataaagccaaaaaagtgacttaacattatgaaataaatcaatttttaatatttttagaccaagaccgatttattcctcttcaggctctgagtttcatcacgtttggatttgatctgtcgctacaaaacgacgtaaaaaccgattcctatttttattcatatttatcattatgttatatgtctccattgagagacattaccgatatctagtgtcgcaaaaacccaacaccgataaatcgcaatagctttggctttggctttggctttggctttggctttggctttggctttggctttggctttggctttggctttggctttggctttggctttggctttggctttggctttggctttggctttggcaggggaactgaatccatttagctgagaaaacgctacctgatgaatcctttaattgaagtattgctctttgaatgatgcacaagagaattaaagcagcggaatattgataaagcagaatgccagcggcatcctcttctcagcgataagcagaaagggttaacgctgagagacaaattcaagacgaaaaaaaaccccgcattgcggggttttcttcggaatgtggtcggcgagagaggattcgaacctccgacccactggtcccaaaccagttgcgctaccaagctgcgctactcgccgatttcttactgcctactctacatagtctttcgacttatgtctatgtaaatattaataaaatctacatagtttgtgtggtgcgaagggagggacttgaaccctcacgtccgtaaggacactaacacctgaagctagcgcgtctaccaattccgccaccatcgcatgttccacaaaaatttggggtggctaatgggactcgaacccacgacaactggaatcacaatccagggctctaccaactgagctatagccaccataacttctttactgctcacaaccgtcgtacgcggcaatattaccaccgcagctcttgcacacaaaattaatggtgcgcccgacaggattcgaacctgagacctctgcctccggagggcagcgctctatccagctgagctacgggcgcttagcgccgttgcgggtgaggatactacggttttaatgcctaactgtctagtgcttttttagaagaaatagtgcgtttgattacgctttgctctctctgccgcaaaagacagctatttagtcccctcaccctacctttatcgctggttttatagacgtttcgtcatcacacgcgtttcttatgcatccctaaggcgaaatagcacagtgacactaacgccaggaaaatcgctcccactaataaagataagcgcgtatccggattaatccccataccaaccagcacacaaatcaggaaggcgatggtcagatagttcacataggggaacataatggatttaaacggatgttgcttaatcgcttctttatgtacctgacggaaacgcagctggctaatcagcaccacaaaccacggtaccatacctggcaacacgctggcgctgtagacatacacaaacacctgctgaggattaggaatgatgtagttgaggctggaaccgatcagcaaacacagaatagtgactgcgatacagtaaaccggcacgccgctggcagagactttcgtcaaaatagcgggcaactggcgattcatcgccaaggcatacaacatacgcccgccgctgtacataccgctgttacagccggacagcgcagcggtcagcaccacaaagttgataatcccagccgctgcggtaataccaatcttggcaaatgtcagtacgaacgggctaccggtagaaccaatttcattccacgggaagatagtgacgatcacgaaaatcgcaccgacgtagaaaatcagaatccgccacagaatattgttaatcgcgcgttttaaggtgacttgggggtttttcgcttcaccggcggtgataccaaccagttccacaccctgataggacgctacgacaatacacagtgcaaacaggaaacctttccaaccaccagcaaagaagccaccgtgctgcgtcaggttatcgaaaccaatcgcctggccctgattgccgaaaccaaagaagatcacgccgataccaaccactatcatcacaataatagtggtgactttgatcatcgcgaaccaaaattccatttcaccgtacagccgcaccgctgcgagattcgccaacgcgacaatgactacgccggcgatcgccggtatccactgtggcaattcggggaaccagaagctgacgtataggccaatggcggttatctccgatatacccacggctatccacataaaccaatagccccaggccgtcagatagccaaaatacgggctgagatacttatgggcgtaaaccgcaaaagaaccggccaccggctccagatagagcatttcgcccatggcacgcataatgaaaaatacgaacaacccggcaatgatgtatgccagtaacactgatggccctgcccatttcagcgtactggctgcgcccataaataacccgacgccaatggtgccacctagcgctatcagttcgatatgccgggcttccagcccacggtgtaatccttttttatcttcgttgtctgccataaatcctctgtagacttaattttgttgtgttcaatcccccggataaccccggttgttataattatcaggaaaagagaaaagcgactgagttcacgccgaacacctgcgaaaggaagcgctaaaactgctggtctgctgcaatcaggttagaaaaatgcatgccgagctaacttaaaaaaactgtcgtactcgtcacggaaattaaccggccaatatcgttccgtatctgaatcatataagcaaacaacaaattaaaaccttatggaatataaaaatgaatttttattccttaaagggatattgctgggatgtatttttgcgaggaatagctcaggaggaaatactggcagggctggattcaccaaccctgcgacagacgcagttaaagacgtccggtatagtaataacctacaaatttaagcaatttaagctgacgacgaatacggctcggctgcgacagcaggcgatacagccattctaaccctagattctgccaaaccttaggcgctcgctttacatggccagtaaacacgtcataagtaccacctacgcccatatacagcgcattagggtgaacctgacggcaatcgcgcataaagatttcctgctttggcgaacccatagccaccgtcacaatcgctgcgccgctggcagcaatgcgggtgaacaaggcgtcccgctgttctggagtaaagtagccgtcctgtgagccgacgatattcacattccactgcgcccgcagtttttcttctgtttctgccaggatttccggcttaccaccgaccagaaacaccggtgtcccctgctgaccagcacgctgcatcaaggcttcccacaggtctgcccctgcaacgcgcgacacttcagcaccggcatacttacggcgaatcgcacgtaccatgctgatgccgtcggcgtagagatactccgcatcgttcaactgggttcgcaatgcggcgtcatcttccgccttcagcagcttttccgcgttcatcgccaccaaagtaccggtttttacttgttcatttcccagcagataatccagcacctgggccatatcgcggaacccccagatattgaagccacgcaggttgtacttaggaattgctgttttttgttccatttctacacttaaaccttacagttgactcgtcgtgtcggcagaagaagcattgttcgccccagtatagctgcgacgaatacgttgcgttattagtccgctgacgtcgaataaccaatacagcagtttcgctaccaccagacaggcgccgaaaataatgcaaaagaagaccactcgagaaacaaacgaatccagcccttcacgcgccaatacgatcatattaaatacggctccgaagcagaagctttgcagaatcgccgccttgtagcggttagtttccgctttaccttgctcgtatagccagtcaaaccacttaataatcagcccgacaataatcgcaccgatagggataaacagcgcgccgcccataaccaccagagaaccaatcagcgtaggggaaatcgccagcccggaatggttatccaatacgtcccaggtgaagtagttcgcggtattcagcaccaaatcaggacgccccggccagagccagcttgggataaacacgtagaaatctcgaactattggtgccagtccctggaaatctatcttgtcgtaattttgcagcaacagccccagattttcccacggcgagaaggtgtctcgcgttaggtacaggaaggtatagaacgcctccgcgccgctgacatccaggctatagcgtttcagcgccagccagaacataccgacaataccgaatacgccagctgccaccagcatccacagcgtaatccaaccgcgcacaatgccgataaacaggaacaatgcaaaagcgataatgatattggcgcgggttccccccacgataacataggtcagaatgccgaaggctacggtgctggcgaggaaaaagaaccatgcccgcatatcctgtttaaggaaatacaccaccaacatcgccggaatgaagaagtagaagaaacgcttcagagccacgccggaaacatcactggagaatatctggctataagaattcagcttaaataacaggaagccgttctgtaggaagaaaatacctacggtgccaatcgccaccagcgccaataagatccaggtcaggttggtttcaacccgattcatcgtaaatatcggccgccgtggctgagttcgtggcttccgcagacgcgttttataggtgacatagtaaatggcgtaaaacgccgtggcggacagtatggcgtacagcaaatagtccgccggaactactgcgacatcaaactgaaataccaacatgcaggtcagcggaaaaccgaagtaaaacgtcagtaaatacagcatggaaaagaagacgttaaagttgaagcgaacccgcctgaactcctgataggtcaacgtgaggataaaaatcactgcgatcaaatagacgctcagcaagccgccaaattgccccaacgtcatgggttttctcccgccgccagcgctaatgcctgctgccaaccatcgatataattagggttaaagaaagcgatggattgcttatccagaccggccaattgccgttgtgcttcacgtatcaaagcttcatccagcgtatcaccgtagaacaacactggaatatgttgctcagccaaatcctgccagaacggattcagacggctaaggacaaaaggcacgccaaattgggttaacagacacaaagtgccgattccctgctgacgattaaaaataaaatagcctaaatcgcattcgcgcagaatattcagatagtcatcgaaggcaatttgttcggtcagaatacgtagattttctgccggaaataacttcagcccagcggttcgcacctgatcgatataagcatcattgttcgcgggatagcccatcggcaaaatcacccgaacatcggcgccaaactgctgacgaatggatttcagcgcttcaatatgtcggttagtggtatcaccggaattaccgaccaaaatcgtcattggcccgactaaaggcttctcagcctgaacgccggtcagcgtcgggtccatacgcgttgggaaataaagcaaagacgctggcactcgcggatgacgctgctgatagtgaatcaaatccccgcgagtagcaaaaacgtgcccgacacgcccttgagccaagcggcgcagcaggtaaaacaggcggaatttccagctttttgcatcttcatacagatcggcaccccaaacgtgccagaaaacctgatatggcttaattttgccgcttaataaagccaaccacagcgtggcattaaactgtccatgccaaaagaaacgggtattacgatcggcctgcgcgcgcccaataaccgcctcagccaacgctttcttattgggcagagtttcaatctctaaagcatcaaaaacagcaaaggaggcactgtctttcgccgcgaccataaaatgccgcacctgttcggcgggcaggcgcgcggccagcacatcgttaaagaagcgcagcaccgtctggttatgatgcgggatgtcagatcccaatacgtgaatcagggttttcatgtttttctaggtaacgaagatctacggtaaatgacgaatacgcagctacacagggcaaaataaacgatataagttgccatataagcctgggctgcgccaagagaaccatgtaacggaatcagccaatgggcaaaaccggtcaacaacaggaactggctaacttccgctagaatataaaatcgcagggaggcttttgcgataaccaaatagccgaagacataagaccctacttttagcacgtcacccaccaactgccaggcaaataaatcgcgcatcgcggtaaactgcttagagaataacagccaaatcgcaaaatcacgcagtaaccacaccatcatgctggctgcggcaaccaccggcagtacaaacttcagcgagcgtaaaatctcgcgggaaatatccgctttatcctttaaacgcgacagcgtcggcaacaaataaacggtaaaagaggcggtaataaactgcaggtaggcatctgaaatactgcttaccccttgccaaataccaacttcatcccagccatactgttttgccagaagattacgcatcatcacgtaagcgacaggaagcgttactgaggtaatcagcgccattatggtgaacttacccaaatggctggccagcgccttatcccaacttagtttaaggtagctgaagggaatagtcttgcgacgcaccagaataaaagtcgctggcacgacgaccaacgcaggaaccaatgctaaacccactaacgcgccaaaatagccgcctaatcggaagcaaagataataagccactacgccaatcagactaccgccgataatcgccagcgcgttgcccatcgcatcgcgataacctttaagaatagccagaaacaggttcgcgtaggcgatacccatttgaataaaggcgacggcacgcaccacgttctcataatcagcacggccaaatagcgccacgctcaccggttttgccgcaaataaaaacagcaaagccaataaggtagagaaacccaacactatcgccgacgaggtgcctaataccgcacgtagccgctccggttgctgatgatattctgcgacatatttggtaacgccgttaaaaataccggctcctgataatacgcctaataccgtaattaactggcggaagttacccgcctgtcctacgccgctggggccaaaagtgaccgccagcagtttaactaccagcaaacctacgccgatcttaatcagcgtagagcctgcggtccaaatagatgcttttgccaatgacatatcaggcgaagaaactcagtacgcggttaataatgattttctggttggcctcggtcagcatatagaagatcggtagacgcaccagacgctcactctctttggtggtaaagcaatcctcaccggataaacggccaaattcggcacccgccgggcaggcatgcaacggaatataatggaagaccgtcaaaatatcggcttctttcatatagctgataaaggccgaacgctcttcaatatcacgaagtttgatataaaacatatgagcattctgttcaacatcagcagggactattggtaaatcgatacggcctgcgtcagcaagaggcttgaatgcagcgtagtaattttgccacagagacagtcgacgttgattaatctgttcagcagcttccaactgcccccatagataggcagcctgtaaatcagccatcagatagctagaaccgatatcacgccaggtatatttatccacctgaccgcggaagaactggctgcggttggtgcctttttcacggatgatttcggcgcgatcgatcagagatggatcattaatcagcgttgcgccgccttctccacccgccgtgtagtttttggtttcatggaagctaaagcaaccaatatggccaatagtacccagcgctttgcctttgtaagtcgacatcacgccctgagcggcatcttcaaccacaaacagatcgtatttttttgccagcgccatgatggtatccatctcgcaggcaacgccagcatagtgaacgggcacaatcactttagttttatcggtaatcgccgcttcaattttggtttcatcgatattcatggtgtcgggacgaatatcgacaaataccattgttgcaccgcgcaatacaaaggcattagcggtggaaacaaaggtaaaactcggcatgatcacttcatcgccgggcttaatgttcagcaacaaagccgccatttccaacgatgcggtgcaagaaggggtcagcaagactttcgggcagttaaaacgctgctccatccactgctggcaacgatgggtaaaaccgccatctccgcaaagcttcccgctgttaattgcatcttgcatataacccagttcggagccaacaaccggtggtgtgttaaatggaatcatttcatcccctgcataaccaataagcggtgctctcaatagatgccccgctacgaatatagagacgcaaagctgcgatgttactcatctgagtggcgacatatagccgctgtaacccgtgatgctgacaccactgctttgccgccgacataagttttgtaccaataccttgccctgcggctcccggaaacgccgccagcaaaccaattcgagccgagccatcctgcaaattacgcaaagtgacaaacccgatagcctgattatggctatcgaccaccagcaaacattggtggtcgaaagttcccagtaccgctttttcggcccatagcgcgtagaaacgcccgctatcctgcgactcataccaaggcgcacggaaacgactaagagcaaaagcgcgggctgcggcgctgcgcaactgaggaatatccaattcagttgcgatccgaactgagcctgcagccagcatatcggaaaaggcggaactcgccgtcgttcccgaatggtcagcgacagaagcagtttccgtgccaattggcagtgaaagatcgatttcactttcaaccagacgaaaacccagcagattaagggcatcaacccaatccagacggtgcgcagggattttagcctgaaccaaagcataggcatccaattctgccgggttcagcaacggggcagaatcagataaattcagttttgcgctgtgtctctggaaaaattcactttcccagttcagcggttcaatattggcgcggacgagcatgcaataaatccagcagatatttaccgtaacccgtttttgcaagagcggtggcagcgcgttttacgccatcatcatccagccagccattacgccaggaaatttcttccagacaggcgattttaaagccctgacgcttctctaccgtttgtacgaaggtactggcttcaatcaggctatcgtgggtaccggtatctaaccaggcaaagccacgacctagtagctcaaccgttaactcaccgcgctccagatacatctggttgatggtggtaatttccagttcaccgcgggaagaaggtttaacctgcttggcaaaatcaaccacttgattatcgtagaaataaagcccggttactgcccaattggatttaggcacgcttggcttttcttcgatggaaagcgctcggaaattatcgtcgaactccaccacgccaaaacgctctgggtccatcacctgataaccgaaaacggtcgcgcctttctgtcgggcaacgacacttttcagtttagggctaaacccttgaccaaagtagatattatccccaagaaccagacagcaggattcaccgttaatgaactcttcgccgatcaagaaagcctgcgccaagccttctggcttcggctgctcggcataacttaggttaataccaaactcagaaccatcacccagcaaacgccggaaggaaggcaaatcttcaggagtggaaataatcagaatatcgcgaatgccggccagcattaagactgacaacggataataaatcatcggcttatcgtaaaccggaagcagctgtttagagacgccgcgagtaatagggtgtaaacgggtaccggaaccgcccgccagaactatgcctttcatagaaactcctgatttgacctgtaacaacgcgctgttcaaatgaagcagcgcgttagatggccgtacagtgacttttagacgtgctggcgaaatttaatcgctcagacccaaacgttcgccggcataagagccgtcctgtacgcgttgccaccaggatctgttgccaagataccaattgacggtcttacgaataccgctctcaaaggtttcctgcggacgccagcccagctctcgctcaatcttcccggcatcaatggcatagcgcatatcgtggcctgggcgatctttgacgtaagtgatcaaatcactgtagtgggcgattcccgcgggtttgttgggcaccagttcgtctagcaaagtgcaaatggtttctaccacttcgatatttttgcgctcgttgtgcccgccgatattgtaggtttcgcctactacgccctcggtcactacctgatatagcgcgcgcgcgtggtcttctacatataaccagtcgcgaacctgagcgccgttgccataaacaggcaaagacttaccggccagcgcgtttaaaatcaccagcggaatcagcttttcagggaaatggtatgggccatagttattggaacagttagtgaccaacgtcggcaggccataagtacgcaaccaggctctaaccaaatggtcgctggaagcttttgacgcagaatacgggctgcttggggcgtaaggcgtggtttcggtaaagagacagtccgtgccgtgcagatcgccatacacttcatcggtagagatatgatggaaacgaaatgcctgctttttctctgctgccagcgcctgccagtagtgccgagcagcttccaacagcgtgtaagtacccacaatattggtttctataaaagcggctgggccatcaatggatcgatccacgtggctttcagcggccagatgcatcactgcatctggctgatactgcgcaaagatacgatccagcgcggcgcggtcgcaaatatcaacctgctcaaacgcatagcgatcgctgtctgccacgacggtcagagattccctattccctgcataggtgagtttatcaaccaccacaacgctgtcggccgtgtcattgatgatatgtctcaccacggcggagccgataaaaccggcgccaccagtgaccagaatacgtctcaacgccatactcctttggtatcaacaatccactgttgcttcacttcttcaggtttaattgccttaaactggctgtgatcgaccagcatcaccagcacatctgcttgctgcagcgcttccgccgtgtttttcagcgtaacgttacctgctaatgatttcggcaattgctctacgttcggctcaaccaccaaggtttcacccgcatgccattctgcaatcaggtgtgcgatttctaccgccgggctttcacgtaggtcatcaatgtttggcttaaacgccagaccgaagcaggcaatttttacttctgatgcacgcttgtcgctgttcgccagacaatcagccaccgccgctttcacgcggtcgacaacccataaaggtttgccatcattgaccagacgtgcggtatggatcagacgcgcctgctgcggattttgcgaaacgataaaccatggatcgacggcgatacagtggccgccaacgcccggaccaggttgcagaatattgacgcgcggatggcggttcgccaaacgaatcagttcccacacgttaatgccctggtcggcacaaatcagcgacagttcgttagcaaaagcaatgttgacatcgcggaagctgttttcagtcagtttgcacatttcagcggtgcgggcattggtcaccacacattcgccttccaagaaaatcttgtacagctcactggcgcgggcagaacattttggcgtcataccgccaatcacccgatcattctgaatcagttcaaccatcacctggcccggcagtacgcgctctgggcaataggcgatattaatgtctgctgcttctccagcctgctgtgggaagctcaggtctgggcggaattcagccaaccactgagccatttgttctgtagcgccaaccggcgaagtcgactccagaatcaccagatcgcctttcttcagcaccggtgcaatagatttagccgcagactctacgtacaccatgtcgggttcgtgatcgcctttaaacggcgttggcacggcaatcaggaaagcatcggcagccaatggcttggtgaacgcctgcaaatagccgccttcaacggcaattttgacaactttatccaaatccggctcgacgatatgaatcgcaccgcgattaatggtctcgaccgcatgagcgttaacatcgacgccaatcacctttttcttgcgcgaggcaaaagcggctgcggtaggtaaaccgatatatccaagaccgataacagaaatagtttcaaaactcatagcgtcacctgatgattctttaatgcttctaggatgcgttgacaggcgtgcccgtcaccgtaaggattatgtgcccgactcatttggtgatatgcattttcatccaccagcaaatgggttacagcatctacaatttttttaacgtcggtgcccaccagcagaacggtgcctgaatctaccgcttctgggcgctcggtagtgtcacgcataaccagcaccggcttgcctagcgatggcgcttcttcctgaattccgcccgagtctgtcagaatcatataagcatggttcatcaggtagacaaatggcaggtaatcctgcggatcgatcagaatgatgttgtcgacaccgtgcaggatacggttaaccggctcgctgacgttgggattaaggtgaactgggtatacaacctgcacgtccgggtgattacgggcaatttcagccagtgcgctgcaaatgcgctcaaacccgccgccaaagctctcgcgacgatggcctgtcaccagaatcatttttttattggcatcgaggaaaggatagcgagcgtccagatccttacgcagtttctcgtctttcaacacccgatcgcgcacccaaaacagcgcgtcaatcacggtatttccagtcacaaaaatacgattatccggcagcaactcacgcaacaggttctgacgcgaattttccgttggcgcaaaatggtacatggccaaatggcctgtaagcttacggttggcttcttctggccacggagaataaaggtctccggtacgcaggcccgcttcaacgtggcctactggaattcgctgataaaacgcggccaagctggttgccaaagtcgtggtggtatcaccgtggactaaaatgacatccggtttaaattcggccagaacgggctttaaaccttccaaaatacggcaggttatttcagtcagtccctgtcccggcttcatgatattcaaatcataatcgggctcaatttcaaacaatcttaggacctgatccaacatctctcggtgttgagcagtgacgcagacttttgattcaaaggcttcatcctgagccaaggcatgcaccagaggagccattttgatggcttcaggacgggtgccaaaaacagtcaacactttcacagtgaatctcttttaggtcagttagccgcagacaacgcctgcaagttgggcgcttacgcgcccattagcaatttagtgctttacgccgggacgacgggccaatgccacgccagctccgactagtgcgccaatcgctccccacataatcatcaggaaagcgcgacgcgggctatcgcgagttaccggatcttccggagtacgcaggtaacggtaggtctggaatttctcttccagagtcggcccaacgtttaatgttgccagcatagcgcggttttgatcgtaatcgatatcaaagcttgggcctgatgctgccagagtttctaaacgcgcctgaagcataggtttgcccagcaggaacattttggaatccggcagttgctccgcaggcgtatccgtttggttacggctaataccctgtttttcggccactttcagcgcttgcttaaccgcattcagctcacgatcgtaaaccgcctgcgctacggcttcctgccgcttaacctgtgctttcattgactgagttcgcgcggcccatgccccttgaatttcatcatttaagtgactggcagcacgctggctagcaaaatcgacatactcacgtagcaatttgttcgagtcagtagcggtttccgcggtcagtttcacgctgtcgttcagcacttttttgtcatcgtgcggcgtgaattgaatattattgaccagctcatccagcaaagctgcatccgctttggcatccccttcctgacgttgcttgtagtaatcactcttcagccagaagtcacgacgggtatcgtaagccgctagttgaataatgaactcattataagcttcgtcagaaatactcggctgctcgctagccgaacctgaaactaaacgggaatccaggttacgcaaaaactgctgttgggaataatagccgcccagattattaactgttggcttatcggtaatcgcagtggcgctccactgctgcttcactaagtaggacacgcttagggcaatgacggcaaacagaaccgccataccgataatccaggctttaccacgccacagcgtgcagcaaaggccgcggatatctaactcgttatcgacagccagttcattgttagtagacgttttttctggtttcatcactgcccaaaagcctctgattaagatacatgcttattattagcccgccgcatccggcgcttaatacgcttgatgaaacgcgccactcgccaggctcgtttgatgcagtagccatacaggaagaatgcaagcaagaataatgccaacattacccattcaggaacaaataccagtcgttcgccgataacaccgacggccgccagcaaggccgcagccaaggtaattaggacaaatgcctgtcgggaagtgaagcctgcacgcatgatgagatggtggatatgctggcggtcaggcgagaacggactcatacctttacgcaagcggcgatacataatggcaatcatgtccattagcggaatcgcgataatccacagagcggtaaccggattgatcggatgggttttaccctgagtggtctgcaacagaatccaaatggcggtaaaaccaatcagcgtgctacccgcatcgcccataaagactttatagcggcgccccaacaaaccgagatttagcaagatatatggcgtaatcgccgcaatcatcgcaaaacaccaaaacgccagtgccatatgcccggcctgatagagcaagatgcccatcgcaccgaatgacacgcaagacagcccacccagcagcccgtcaataccgtcaaccatattgaatgcattgatagccgcccacacggcaaacagcgtaaccacgtaaccgaacgggccgagaaccatttcccacgggccaagaacgtgtccaaggctgtgcagatagagtccggcaaacgccatcattactacaccgactaaagcctgaacaaaagcgcggattttaacgctaatatcaaagcggtcatccaaagcaccaacgaacactaataaaccggcgcaagccagatagagtgaaccgaagggaatttgctggctggatatcaggaaggcaaaacagatacccgcatacacagaaataccgccgactaagggaatcagcccctgatggcgtttacggtaattgggtttatcgacgagaccgattctctttgccactttacgggcgatgaataaaaaagctaaagaaaacagcaggacgattagaatctctgtactcatggtgagtaatttcacgttaaacagctctctgcaaaagataaggcagcttagcatgtgagtaaacttactccacgatgcaaaacaacctttcagtcatttcctattagggtgacagcctatattgtttttacaacaatatcctcgttctattcacggagaacctagagctagatacgaaaatgccatcaccattaacggtgtagatctactgatcaaataaataagcgtatttatcgtatattccaaacgtgaaaaacgccacgactgagcgtggcgttttgttcgttttatttaaattacgaacgtctcatcatatcgaagaagtcgtcgttggtcttcgtcatagctaatttattaatgaggaattccattgcatcaatttcacccattggatggataattttgcgcagaatccacattttttgtaattcttcagtcgtggtgagcaactcttctttacgagtaccggaacggttgtaatcgatagcagggaatacacgtttctcagcgattttacgcgccaagtgcaattccatgttaccagtacctttaaattcttcgtaaatcacttcatccatcttcgaaccggtatcaaccagagcggttgcgatgatggtcaggcttccgccctcttccacattacgcgccgcaccgaagaaacgcttaggacgatgtagggcgttagcatccacaccaccggtcagaaccttacctgaggcaggcaccacggtgttataggcgcgagccagacgagtaatggagtccagtaggatgataacgtcttttttgtgctcaaccagacgtttcgccttctcaataaccatttcggctacctgaacgtggcgagacgctggctcatcaaaggtagaagcaataacttcacctttaaccagacgctgcatctcggtaacttcttccggacgctcatcaatcaacaataccatcagcacgcagtctgggtgattgtaggcaatgctggttgcaatgttctgcaacaacatggttttacccgcttttggcggtgctacgatcaaaccacgttgtccgcggccaattggcgaagccagatccaacacgcgcgccgttaagtcttctgttgaaccgttaccgcgttccatacgcaaacgtgaatttgcatgcagcggggttaagttttcaaacagaattttattacgggcgttttccggtttgtcatagttaacttcgttaacttttaacagtgcaaaataacgctcgccttcttttggcggacgaatcttaccggaaatggtgtcaccagtgcggaggttgaaacggcgaatttgacttggggatacatagatgtcgtcgggaccggcgaggtaggagctgtctgctgaacggaggaaaccaaatccatcctgcaatatctccaatacgccgtcaccgaagatatcttctccacttttagcatgttgcttcaggatagagaatatgatgtcttgtttacgcatccgggccaggttttccagccccatattttcgccaagtgtaatcagatcagaaaccggcgtattctttaattcggtaagattcataatggtgggttcttaaactcggggtatgtctcgaactttagtcgtgaatgggtatggcagcgtcatccgtgcctgtttaatggacattcaatctcggccttgtgtgctgcgcgagtaatagcttgcgcaaaattcgcactcaacgacggcaataaattgaaggtaccttagactgattttttaaaaccgttagactgtcaaaaaaccgattgagttcatatatattctcaacgcaaatgtttcgacatagagtaaaactttagattcaaactatttaggtgctacagaattttttagatgctacaaacctagattctactcacaggtatgttctatacgcagtggaataaacttaacacgcttctttgcaggcgtctagcggtcagtgtgaaaatcacacccaccgcaggacacccggcttttgacactaatatcgactacagattttcgtccaggaacgctttcagctggctcttggacagggcacccactttagttgccgcaaccgcaccgtctttaaacagcaacaacgtcgggataccacggatgccgtattttggcgcggtgcccgggttctgatcgatgttcaatttagcgatggtcagtttgccttcgtattcttcggcaatctcatccaaaatcggagcaatcatcttgcacggaccacaccattcagcccagaaatcgaccaacaccaggccagtggcttccagcacgtcagtggcgaagctgtcgtcactcaggtgaataattttatcgctcatgttctactccaaaggattgtgtctacctagttgatgtagcattaaccaacattaggttgactttatttcaccggatacgctttcgtaaagcaatagttagctgatattctaccacactatgagcaaaacacacttgactgaacagaagttttccgacttcgccctgcacccgctagttgttgaagcccttgaaaacaaagggtttcaatattgcacgccgattcaggcgttagcattgcctctcaccctgtctgggagagatgtagcaggtcaggcgcaaaccggtaccggaaagacgctagcattcctggcgtctacttttcattatttgctttcgcacccagcagaagagggtcgtcagactaaccagcctcgtgcattaattatggcaccgacgcgggaactggcggtacagattcattctgatgctgaagccttatcccagattaccggtttgaaactgggtctggcctacggcggtgacggctacgacaaacagcttaaagtgctggaaagcggcgtcgatattcttatcggtaccactggccgtttgatcgactacgcaaagcaaaactacattaatctgggcgctattcaggtagtggtactggatgaagccgatcgtatgtacgatttgggctttattaaagatatccgctggttgttccgccgcatgcctgcggtagaaaaacgtctgaatatgctattttccgctacgttgtcctaccgcgtacgtgaactggcgtttgaacagatgaataacgccgaatacgtggaagtggagccgttacaaaaaaccggccaccgcattaaagaagaactcttctacccttcaaacgacgaaaagatgcgcctgttacagacgctgattgaagaagaatggcctgaccgctgcatcatttttgccaacaccaagcaccgctgtgaagaaatctggggccatctggctgccgatggacaccgcgttggcctgctgaccggcgatgtcgcgcagaaaaaacgtctgcgaattctggaagatttcaccaaaggcgatttggatattctggtagcaaccgatgttgcggctcgtggcctacacattccgttggtgactcacgtattcaactacgacctgcctgacgattgcgaagattacgttcaccgtatcggtcgtaccggtcgtgctggcgaaagcggccattcaattagtctggcgtgcgaagagtatgcattaaacttaccggctattgagacctataccggtcacagtattcctgtcagcaaatacaatagcgatgcgctgttgactgatttaccggcaccaaaacgtctggcacgtacccgcaccgggaatggcccgcgccgtaattctgcccctcgccgtaacggcgcgccgcggaacaacaaccgtaaacgaccaggctgataacgcgatgctaagctccacctcactttatgctgccatcgatcttggctccaacagtttccatatgttggtggtacgtgaggtggctggcagtatccaaacgctggcccgaattaaacgcaaagtcaggctggccgcaggattagatgctaataaccatctgtcacatgaagcaatggaacgcggctggcaatgtttgaagctgttttccgaacagttgcaggatattccgcggcaacaaattcgcgtggtcgccacggcaaccttgcgtttggcctcaaacgccgaccaattcctgcaaacggccattgaaattctgggttgcccgattcaagtgattagcggtgaggaagaagcgcggctgatttatcacggcgtcgctcacactactggcgggccagaaaagcgtctggtggtcgatattggcggtggcagtaccgagctggtaacaggttccggcgctcaggcgtccatattggtcagtctgtcgatgggctgcgtaacctggctggaacgttatttcagcgatcgcaatctgcaacaggaaaactttgaccaagccgaattagcggcgcgtgagatgatcaaaccggtcgcggcacgttttcgtgagcacggttggcaaatttgcgtcggcgcttccggcacggtgcaggctttacaggaaattatggtcgcccaaggcatggacgaactgattacgctgccaaagctgcaacaactgaaacaaagagccattcactgtggcaagctggaagaactggaaatttcaggtctgacgctggaaagagccttggtattccccagcggcctatcgattttgatcgctattttccaggaattgggtatcgaaagcatgacgttggctggcggcgcactgcgcgaaggtctggtgtacggcatgctgcatttacctattgagcaagatattcgcagccgcactattcgtaatctgcaacgccgctatttgctggatattgagcaagcccagcgcgtcgcgcagttagcggataacttttttctacaggttgagaaacagtggaaactagagggtcgatgtcgggaattattgcaaaatgcctgtttgatccacgaaatcggccttagcgttgatttcaagctcgctccgcagcatgccgcctacctgattaggtatctggatctgcctggatttacccccgcgcaaaaactgcttctctccgctctcttgcaaaaccaaagcggcactctggatttatcactgcttagtcagcaaaacgcgttacccgtagtcatggcgcagcgtttatgtcgcttgctacgtctggcgatcattttctccagccgtcgtcgggatgacaccttaccagcggtaagattacgcgccaatggcgacactctgtgcgtgctattaccacaaggctggctgcagctgcatccttatcgtgctgaatcactggtacaagaaagtcactggcaaagctatgttcagtggcctcttactctggaagcgtttggttaagcattatctcgggcggttatagatagccgcccattatttctcccttttcttattcagtaaccctccctcaccactatttcgtctaaaaaaacagtaagcactcgatatgtgatcgccttcatcttaaaaataaaactatgtgtgtatttttatagaacagcgtttctattttaaaattatctcctccatcagaagacagcgctgtctgcgacaactctctccatttcaatgaggaataagaatgcgcgtacagcttcaacgtcgtcatcccctgaatatgctgttgattctttctggtttggcacttgcccctgccacagcattggccgaactgaaagcaccgcaaaatctacaggttcccacgctggcttatgacgaaaacagcttagtattagtgtgggaagcgccgcaagataacggtcaaatcgtcgattatcaggtgtattccgcagggaaactgctgggccttgccagtgaaaataatgaccgatactctccggccaaaccctatatcaatcatttctacgcaaatgataagcagcaatttcagcacaagattctgatacagaatttcaccgtacaggggctacaacctgacacgacttactcgtttagcgtcaaagcgcgctatgctgacggttcactgtcacctgacagtcaggtgattaccgcgaaaacaacggcgttacctcaggtgctgaatattcgtgatttcggtgccaaagacgatggaaaaaccctcaatacccaagcgattcaacaggcgatcaatagctgtaaacctggttgccgcattgatattcccgctggggtgtataaaaccggcgcgctgtggctaaaaagcgatatgacgttgaatcttgaggctggctcgaccttgctgggttcggaaaatccgacggattaccccgcaggctattatctttatagctattccaccgtccagcgtccggcttcgctgattaatgccataaatcctgatcagaccgcgccgggcaccttccgaaatatccgcatcgttggctttggaactatcgatggcaatggctggctccgcgcgaaaaccggcgaaatatcagatgaattaggcaataagctgccgcaatacgccgtgagcaaaaataccaaagtgcacgaagacggcattctagccaaaaatcaggttgaacaggctgtttccgcaggaatagatctaaaaacggcttacggccagaaacgatccagtttgatcaccttgcgcggcgtagaaaatctgtatctagccggattcaccgttcgtaatccggcatttcacggcattatgaatctggaaaaccataacgtggtggctaatggtttaatccatcaaacttatgatgctaataacggcgacggtattgagttcggcaatagtcagaatgtcatggtgttcaataacttcttcgatactggcgatgattgcattaactttgccgcaggcactggcgaaatggctcagcaacaggagccaatgaaaggagcgtggttatttaacaactatttccgcatgggccacggcgctatcgtcaccggcagccatactggcgcatggattgaggatattctggcggaaaataacgtgatgtatctgacggatattggcctgagagccaaaagtacccgctcaatcggcggtggcgcgcgcaacgtcactttccgcaataatgctatgcaagatatcgccaaacaggctgtcgtcatgacgctggactatgcggatagcaatgccaatctggattatcctccggcgaaaattcctgctcaattctatgattttacagtaagaaatgtgacagtgaataaccagacaggaaaaaacgcatccattgagattaagggtgacagtgacaaacaggcctggcaccgtctggtgcatttcgacaatgtgaaattcgatcgggtcacgccaacggcaatcagcgatttacgtgatagccagttcaatcaggttattttcacccagctacgtggcgaaaacccttggcatttcagcgcgataaaaaatgtaaccgtagatgggaaacccgtgacaccatagggttcatcaacagatttccctacccattatttcttggcatttgccaattgagcacgaatactggccagatgactctggcctttttgcatccgttcttccggcgtaatcactttacgctccgattcccagtccaaatcatcctgcggcaattccatcagaaaacggctaggttccggccgcattaattcaccgtattgccggcgttcccgacagtgtgtgaagaacagttcccgctgggcgcgagtgatgccaacgtaggccagacgtcgttcttcatccacattatcttcgtcgatactgctttggtgaggcagtagcccttcttccatgccgactaaaaatacgtagggaaattccagacctttcgaagcgtgcaaagtcattagctgcacctgatccaactcttcgtcgctttctccgcgctccatcatatcccgcagggtgaaacgcgtgacaacctgggtcaaagtcatttgctcgtccagttccgagccttccaacatttccgtcatccagctaaacagcatgttgacgtttttcatccgcatttctgccgctttcgggctgggagaagtttcaaacagccaactttcgtattccattccgtgaagcaaatcccgcactgcggcaataggttcacgctccaccagccgaataatactctccagccagtgggtgaaacgctgtaaagactctagtccacggcctgtcagatgctggctcaaacctaagtcaaagctggcgtgatacaggctcttgtttcggatattcgcccattcgcctagtttctgaatcgttgccgggccgatttctcgtttaggcgtattcacaatgcgcaggaaggcgctgtcatcgtcctgattggttaagacacgtagataggctagcaagtctttgatttcagggcgagaaaagaaagagtctccgccggaaatgcggtaaggaattcggttttgcaccaacaatttctcgaaaagccgcgattgatggttaccgcggtataaaatagcgtaatcaccgtactgagttttcttaataaagtgatgggcgatcagttctcccaccactctttcggcttcatggtcttcattattggcggtaataaccttcagcggttcgccgtaacctaattcggaaaacagtcgtttttcaaaaacgtgcgggttattggcgatcaaaatattggccgctttcaatatcctcccagaagaacggtagttttgttccagcttaatcacctgcaactgaggaaaatcttgattcagcaacaccaggttctgcggccgagcgccacgccaggagtaaattgactgatcgtcatctcccaccacggtaaagcgcgcccgattgcccaccagcaacttaaccatttgatattggctggtattagtatcctgatactcatctaccagcagataacgtagtttgttctgccagcgttcgcgcacttcttcgtttttttgcagcagcagcgttggcagagaaattaaatcgtcaaaatccagtacgttgcaggcttttaagtgatcgtcatataaggtatagcagtgagcaaagatcttatcgcgttccgaacgcgcctgtgcagccgcggcggccggagtcattagatcgtttttccaattagagatcgtcgagatcaactgctgtagctgagttttatcttcttccaaccacttgctggtaagatcttttagcaaccccatctgatcctgtgcgtcaaacagcgagaagttagatttcatccccagcgctttatattctttcttaatgatttccagccccaaagtatggaaagttgaaatcattaaaccgcgagcttctttacgccccagcgtttgcgccacgcgttctttcatctcgcgagcggccttattggtaaaggttacagcggcgatatggctgggcttatagccacactgacggatcaagtgcgcgattttattagtaattacacgggttttacccgagccagcaccggccagcactaggcagggtccggtgacaaattcgacggcttgttgttggctgggatttaatcgcatagcgctcggttactcacggttactctgtgggatggtggggaggaagagtgtagcagaaagaagcgggtgaaaaaaaacgcctgtcattttgctttcccgctttcaagccgccaaaagcttcaatcgtcggcaaaatacgctacactggcggccgattaaaggcgatattcattcaaattacattgtggtgataagtattatggcgaacaaagcttctgcgttgcatattctggtcgatgatgaaaaacaggcaaatgatattctggcgcagttgaacaatggcgctaatttccaggaattagccaagaaatactctaattgtccgtctaaacgtaacggcggcgatctgggcgagtttaacaagggcgatatggtgccagcttttgataaagcggtatttagctgtgaattgctacaaccttatggcccggtaaaaacccagttcggttatcacatcattaaagtgctgtaccgtagctaatattgctgagcttgaatgtaaaaaaaccggcacgcatggccggttttttatagcgaacatctcgagcactgacccatctcaaaatggccagcaaggtagcttgattagcccgcaaccgcgatgcgcttcatatccttcatatacccacgcagcttatgccctaccgcctcaatcggatggttacgaatcgcttcgttaacatcacgcaactgagcgttatctaccgcagtacccgctacgcttttgcccagatccccggcttgcagagaatccataaatttggctttcagcagcggtaccgctgcattagcgaacaggtagttaccgtattctgcggtatcagagataaccacgttcatttcatacaaacgcttacgagcgatggtattggcgatcaacggcagctcatgcagcgattcgtaataggctgattcttcgataatacctgaatcaaccatggtttcgaacgccaattctaccccggcttttaccatggcaatcatcagcacgccgtggtcaaaatattcctgctcggagattttaccttcgaactgcggcgcgttttcaaaggccgttttaccggtttcttcgcgccacttcagcagtttcacgtcgtcttctgcccagtcggccatcatgccgctggagaatgcgccggaaatgatgtcatccatatgtttttggaacagcggcgccatgatttctttcagttgctctgacagcgcgtaggcacgcagtttcgccgggttggacagacgatccatcatcagagtgataccgccctgtttcagcgcttcggtgatggtttcccagccgaattgaatcagtttttcagcgtaggctgcatcagtaccttctgccaccagtttgtcgaagcacagcagggaacccgcttgcaacataccgcacagaatggtttgctcacccatcaggtcggatttcacttccgcaacaaatgatgattccaacacgccagcgcggtgaccaccggttgcagcagcccaggctttcgcgattgccatgccttcgcccttaggatcgttttccgggtgaacggcgataagcgttggtacaccgaaaccgcgcttgtattcttcacgtacttcggtgcccggacatttcggcgcaaccatcactacggtaatgtctttacgtacttgctcgccaacttccacgatattaaaaccgtgcgagtaccccagcgccgccccgtctttcatcaacggctgaacggcctgaaccacggcggaatgctgtttgtctggcgtcaggttgaccactaaatcagcctgcggaatcagttcttcgtaagtgccaactttgaagccgttttccgtcgctttgcgccatgatgcccgcttctctgcgatggcttctttacgcagcgcgtaggctacgtccaggccagagtcgcgcatattcaaaccctgattcagcccctgagcaccacaaccgatgatcaccacttttttacctttcaggtagttcgcttcatctgcaaactcttcacgtcccataaagcgacatttacccaattgcgccaactgctgacgcaggttcaatgtgttgaaataattagccatagtggtactccgttcgatgttgtgttgcgttattttcacatcccccaatctgtgtgagggattctcttgaattcactatatgtcaggaaatccgttgctgaaattgatatatttacaaggtgtcgttgcagattttgcaatataacaatttcctcgccaacgagagccagcgctatggatttacgtgacctgaagctgtttttacatctggctgagagccgccattttggccgctcggccaaagcaatgcatatcagcccatctaccctttcccgccagattcagcggttggaagaaaccatagggcagccgttgtttctgcgggataaccgtaccgtgcaactcaccgatgccggcacccagttgaaagcctttgctcaacaaaccttattgcaatatcagcaattgcgtcatgcgctggggcagcacgggccgtcactgagcggcgagctaagactgttttgctccgttaccgccgcctacagccacttgccgccgattctggatcgttttcgcgccgaacacccactggtggaaatcaaactgaccaccggcgacgccgccaacgccgtagacaaggtgcagtctaacgaagccgatttggggattgctggtcgccctgaaaccctgcctggcacggtagaattcacccaaatcggcgagattccattagtactgattgcgcctgcgctcccctgcgccgttcgtactcaggctgctgaagctcatcctgattggaacaatattccgtttatcctgccggaacacggcccgtcgcgaaaacgcatcgatttatggttccgccgccatcgcattactaacccactgatttacgccaccgtttccggtcatgaggcgattgtttcgatggttgcgctcggttgcggtattgccctgattccggaagtggtggtggaaaacagcccagaacccgtgcgaaaccgtatttctttactcgataatatttcgctggttgaaccctttgagttgggagtctgcgtgcagaaaaaacgtttaaacgaacccttgatcgaggcattttgggggctgctgcacagccccgtttgatgcaaattaaccggcgaggaagaatctaaacgccggattatcggtttcatcgtggcaaatgtagcccagcgcagtcaggtgctgttcaaattccggctcgatctcggatagctcgaagcccgccagcacccggccaaaatcagtgccgtggctgcgataatggaacaacgagatattccagtgggtaccgagcgtattgaggaatttcaacagcgcgccctgtgattccgggaattcaaaactgtacaaacgttcgcgcagcggcttaggaggacgaccgccaaccatatagcgcacatgcagtttggccatttcatcgtcggacaaatccactacctgataaccatccgcctgtaattcagcgatgatttcagcccgttcggcgaatcctcgggtcaaacgcaccccgacaaaaatgcaggcgttatccgcgtccgcgtagcgatagttaaattcggttaccgcccgaccgcccagcaattggcaaaagcgcaggaaactgcctttttgctcaaggatcgttacggctaacagcgcttctcgctgctcacctagttcacaacgctctgaaacataacgtaaaccgtggaaattaacgttagcgccagaaagtatatgagccagacgttcaccttgaatattatgctgctgaacatattttttcagccccgccaacgccagcgcaccggaaggttccgcaatcgcacgaacgtcttcaaaaatatctttgagcgccgcgcagatggcgtcgctatccacggtgataacgtcatccagatattcctgacacaggcggaaagtctcgtcaccaatgcgtttcactgccacaccttcggcaaacagcccgacgcgagccaaatcaaccggagctcccgccgctaatgccgcttgcaaacaggcagagtcttccgcttccacgccgatcactttgatttgcggcatcagttgtttaattaataccgccacgccagcggccagaccaccgccgccaacgggaacaaaaacccgatccaaatgggcgtcctgttgcagtagttccatcgccagcgtgccttgtccagcaatgaccgccggatgatcgaaaggcggtataaaggtgtaaccctgctggcgggaaatttcgatggctttagctttggcctcatcaaaattggcaccaaacaacagcacttcgccaccaaagctacgcaccgcatccactttgatgtctgcggtggcaaccggcatcacaatcagcgatttaatgcccagtttactagcagaaagcgccacgccctgtgcgtgattacccgcagaagcggtcactacgccgcaggctttctgttcttcattcagccccgccagcatggcgtaagcgccacgcagcttaaaactgtgtaccggatggcgatcttcccgcttaaccaaaatggtgttactcaagcgagatgaaattttctccatcacctgtaatggcgtgacctgcgtaacttcatataccggcgcgcgcagcaccgctcgcaggtactctgcgccactgggcgcatcgggtaacgcttgtgattccgccatagcccttaacctcccagcttacttttatcacgaacagcgcctttatctgcgctggttgccagtgaggcataggcacgcaaagcgtaggaaacctggcgtacgcggtttttaggtgtccaggcagcggagccgcgagctaattcggcttcatgacgagccgccagttcagcggccggtacatctaataccatgctgcgctgaggaatatcgatattgatcatatcgccgtcctgcactaggccaatcaggccaccgctggccgcttctggcgaaacgtggccaatagacaaaccggaagtcccaccggagaaacgcccgtcggtaatcaaagcgcagcttttgcctaagcccatagatttcagataggtcgttgggtacagcatttcctgcatgcccggcccgcctttcggcccctcgtaccgaataatcactacgtccccggcaaccacttttccacccagaatcgcctctacggcagcgtcctggctttcataaactttggctgggccacggaaagtcaggctttctttatccacaccggcagtttttacgatacagccgttttcagccatattgccgtacagcacggctaagccgccgtcctgactgtaggcatactcgcgcgtacgaatgcaaccttcctgacggtcggtatccagcgacggatagcggcaatcttgcgagaaagctttggtggtacgaatacccgcaggccccgcggaatacatgcttttgactttttcatcgctggtcagcataacgtcataggctttcagagtttccggcagactcagccccaatacgtttcggacttcgcggttcagcaagccggctcgatccaactcccccaagatccctacaacaccaccggcacggtgcacgtcttccatatggtatttctgagtactcggcgccactttgcataaatgcggaactttacgcgacagacgatcgatatccgtcatgctgaaatccacttcaccttcctccgccgccgccagcaagtgcagaacggtattggtagaaccgcccatggcgatatccagcgtcatggcgttttcaaacgcagccttgttggcgatattgcgtggcagcgcactgacatcatcttgctcgtaatagcgtttagtcagctcaacgatatgtttgccggcatcgaggaataattgtttacgatcggcgtgagtcgccagcaatgaaccgttacctgggagcgctaaacctaaagcctcattcaggcagttcatcgagttggcggtaaacataccggagcaggaaccgcaggtcgggcaggcggaacgttcaatttgcgcgctatcttcgtcgctgacgttcgggttcgcgccctgaatcatcgcatcgaccaaatccagcttgataattttgtctgacagcttggttttacccgcttccattgggccaccggaaacgaaaataaccggaatattcagacgcagagacgccatcagcatccctggggtgattttgtcgcagttggaaatacacaccatggcgtcggcacagtgcgcattaaccatatattccacggaatccgcgattaactctcgtgaaggcagagaatagagcatgccaccgtgtcccatggcgataccgtcatccaccgcaatggtattgaactcttttgccacgccgcctgacgcttcgatttgctcggccaccagcttgcctaaatcgcgcaaatgaacgtgtccaggtacgaattgggtaaaggagttaaccaccgcaataattggtttgccgaagtcatcatcggtcatacccgtagcgcgccaaagtgctcgggcaccagccatattgcggccatgagtggtggtatgggaacggtacttaggcattatctcttcactcctgtgtcttttataaagcaggtggcgaacgaaccacccgcgggttctgtctgtcactttttagttattattgattgataggatccagccagccgtacttgtcttcagtttcgccggtgaacaggccaaagaacgcctgctggattttctcggtaattgggccacgtttacctataccgacctgaataccatcaacgctgcgtactggggtaatttcggcggcggtgccggacataaacacttcgtcagccagatacagagattcgcgagacagcacctgctcacgcacttccaggcccatatctttagccagcttgataatggcatcgcgggtaatacccggcagagcggatgaggtaaatggcggagtgaacaatactccgtctttcacttcaaacaggttctcgcccgcaccttcggacaagaagccgtgaacgtccagcgcaatcccttcctgataaccatgacggcgcgcttcgctgcccaccagtaaggaagaaaggtagttaccaccggctttagcggcagttggaatggtattcggcgcaacgcgattccaagatgaaaccattgcgtcaatgccctgtgccagcgcttcttctcccagataagcaccccaagggaatgcggcgatgataacgtcggttttgtagccttccggcggattaacgcccattcccacgtcaccgataaacaccagaggacggatgtaggcgctagtcagtttatttttgcgcagcgtctcgcgacaggcttccatcaactcatcgacggattgtgaaactggcatccgatagatcttggccgaatcatgcaaacgctgcatatgttcgcgatggcggaatacaaccgggcctttatgcttggtttcatagcaacggacaccttcaaagactgatgttccgtaatgtaacgcatgagacattacgtgaactttggcttctgcccacggaaccatttcgccgttaaaccaaatgtaatcagctttcttagtcattctgtactttccttctagcgcctcaggcgcgtatttgtaatgtattggtctgctggatttctacactcgcaacatccaacaacttattcaactgagaagacagtaaatctaccgaacgttggctagcaacggtcagctcgatattaatattttcgttattaaggataggcgacatattcatagcacaaacctgaaagccgcggtggcgcaccactcgcaatacgcgctctaacatttcagggcggaagcgggcttggatcgagagctgatgttgcatcatgaaattttctccagcatggtttcgttacctgcgcccggcggaactaacggccagacattttcgagttcgtcgatggaaacctgaagcaggtacgggccggtactgttaaacagagcgtccaatgcggcatcgacttggtctttgcgggtgatacgttggccgggaatatcaaaagcgctggccaaagtgatgaaatcggggttatcggataagttggtctcactgtagcgggcatcaaagaacagctgctgccactgtcgaaccatgcccaaacgctggttatccaacaaaacgatcttcagcggcaactgtttgcgctttatcgttcccagctcctgaacattcatcataaaggagccatcgccggacacgcagataaccatgtcgtcccgacgagccatttgcgcaccgacggccgccggaacaccaaagcccatcgtgcccaacccgctagaagtgatgaagttttccggacgggtaaaactcatatgctgtgcagtccacatttgatgctgaccgacatcggtagtgataacggtttcaggccctttacgatcggaaatctgtttcagtaacagcggcgcataaattgcttgccccggatggtcataacgccagctatgctgctgcttcaacgcaataacttcatcgcgccacggctggatgtccagaggttgctgcaacgcgggaagcaaggttttcaaatcaccctgcaaagcaacgtgagcctgccgcagtttgttcaactccgtcggatcgatatccatatgaataactttggctttcggcgcgaacgcgttcaacttaccggtcactcgatcatcgaaacgtgctccgacggcgatcaacaaatcgcactcctgcaccgccagattggctgccttagtgccgtgcatacccagcatgcctaaatagcaaggatgctcagcgtcaggggcacccaaccccttcaaagtcactacggcgggaaccccggtttcagcgataaacgctcgcaaggcaggcaccgcctgtgccatacctacgccaccaccgacataaacgatcggttgtttggccgcacttaacatgtcgtaagcctgctggcgttcggcactggaatccagatagtgttcttccaccgacagcaaatgcggatgtaactctgcgacagctaactgaatatctttcggaatatcaatcaaaaccggcccagggcgaccgctactggcgatggcaaaggcttcagccataatgcccggcaacgcgtctaaagactcaaccagaaaactgtgtttggtacaggccaaagacagccccagcacatcaatttcctgaaaagcgtcggtgccgattaaggcagaacccacctgaccggtgatagcgataatcggaacagaatccaataacgcatctgccagacctgtgatcaagttagtggctccggggcctgaagtggcgatgcacaccccgacctttccggttgcacgagcataaccgatggcagccattactgccccttgctcatggcgacacagtagatgttcaacgccaccgtcatacaaggcatcgtagactggcataattgccccacccggatagccgaataccgtctctaccccttgcgcacgtagcgcttgaaccacccactgagcaccattcatagttatttccccgaacttttgcgagcgacacaggattttattctgttgtgcattttacgttcaccgcgtctttttaccggccaataaaaaacccccggacctttcggtgcgggggttctcttgtgattaaggcttgatttttatgcctttcttcgtccaagtgcagccccgcacggtgggataataatcaccaccacgctaattaggactaggttaatcacttggacgaaagctttcataatcggttgttcacatgtctgttgtcgaacgaatacctacagagttatcacagttattatcgctatgacaatatttttttaaaaagtcattttgtgacccaagactacaattgcaataattgtgttaattatcaaacgataaaaccgatatttctttccctgatttttgtacagaaaatttacgcttaacgtccccatgcttaaaaaaatgtcagagatacttttgcactgagcctgaaatttcttcataaccgagacgtttttacgataggccacgcaaaattcatgtcttccctcgtaatcaaaacgatagttttcgcgccttctcgcaggctaaacaccaccctaatgacaaaaaaactcaattcggcaagataccaaacatcagaagggggaaaactatgtcactggccgtcatccatacccgcgcttccattggcgtacaagcacctccagtcaccgttgaagtgcacattagcaacgggttaccggggctgacattagtcggattacccgaaacaacggtgaaagaagcgcgggatagggtacgtagcgccttattaaacagtggatttacctttccggctaaacggattaccgtcagtctggcgccagcagacttacccaaagaaggtggtcgctacgatttgccaatagccttagccatcctcgcagcctcagagcagatccccgtagataagctaggtcaatatgagtttcttggtgaactcgccctgtcaggcggtttacgcagcgttagcggcgctatttcagccgctctggccagtacaggcgcctctcgtctgttaatactgccctgcgccaatgaaatggaagttggcttaatcgtcaaaggaaacagtttggttgcagagcatcttctggctgtttgcggttttctgcgtggagaaggctcactttcctccccaaaacaagcaagtgattggcaggaatgggataacacactcgacctgcaggatattatcggccagcaacaggctaaacgcgcactggaagtcgccgctgccggaggacataacttactgttacttgggccacctggcaccgggaaaacgatgttagccagccgattaaatggtttactgccacccttaagcaatcaggaagcactggaaactgccaccgtagccagcttactgcaagggcatcaggctcccacgcattggtgcaagcgcccatttagatcaccacaccatagtgcatcaatggcagcgttaattggcggcggttccatacctcgtcccggagagatctcgctggcacacaacggcgtgttatttttggatgaactgcctgaattcgagcgcaaggtactggactcattacgggaacccttagaatctggcgaagtggttatctcgcgagcaacggcaaaagtgtgtttcccggccaaaatacagcttatcgccgcgatgaaccccagccccagtggacattatcaggggcgacacaatcgcgcacagccacagcaaatactgcgttaccttgccaaattatccggcccattcctcgatagatttgatttatccattgaagtgccattgctaccgaaaggtttattgaggatgcaaaaaaatagcggggaagatagcgcaaccgtcaggcagagagtattacaggcaagagaaaaacaattgcatcgttcaggaaagataaatgcccaactcaacagcaaagaggttgctcgattttgtgcggtcacgccgcaagacgcacaatttcttgaacaagtgctgctgaagctcggtttatccgtacgagcctggcatagaattttgaaagtcgcgcgcacgctggccgatttggcacaacaggatgacattcaaaagccacacatttctgaagccttgagctatcgttgtatggatcgtttactgttacagctacacaaagcgttgacgtaaaaatggggctttcgccccatttctattagtcatcgctatcgacatagtcttccgttgcatctgcctgcggtttaccgccagacagcgtatggaagcgctttggacgccggattcgggtgatgtatttggaccacactttttccgcatcgctaacaggctcgcgctcgccacgacaaacggcaacaaacagttgctcttcttcgtttgctggctcacgtttgcctaaatccagctcgttgaaagcatagccatggcgctctagcaattgcgcctctttaatggtgaaatcaccgtgacgcgagaacccgcgaggatagtgtttgttatcaaaaaaacgattggttgtgatgaagctatccgccatctgacacgctcctaattctgtcatggtcgtgctgtttatggcgcggagtattagataggcttgacatcgtgtaaaacaaaacatttaaatcttaacgacaaaaaaaattggagataggtgtggacaccgaattactgaaaacctttttggaggtcagtagaacccgccactttggccgcgcagcggaatctttatacttaacacagtcagcagtgagttttcgaatccgtcagttggaaaatcaattaggtgcaagtttattcactcgccaccggaataatattcgtctgacgccagccggcgaacgtttggtgccctacgcagaaaccttgatgaatacctggcagttggccaagaaggaggtcatacactctcttcagcatactgagctatcgattggcgcaacggcatcactatgggaagcctatctcactccatggttacagacactctatctccaacgagaagggctgcgactcgaagctcgtattgcgttacgccagtctttagtgaagcaattgcatgaacggcaactcgaccttttaatcactaccgagccgcccaaaatggacgaattagccagccaactgttagggaatttttcattgcggcttttttcatcaggtcagcaagataaaaccgaagaaatgccgtatataaaactggagtggggggcagattttcatcaacaggaaaatcgcctgttagaccatgagcaaatgccagttctgacaacgacttctgcccatttgacgcgacaactcttagacacgactggcggctgtgcatttttacctgagcattggcaaaaagattacccgcagcttgttgctaacccggagatccccgcaatagtgaggcctatgtacgcggtgtggctacaaaatagcgatcagcagatattaatccgccaattattaaaaactccgatgaataacgccactgaaggggccacacggagttaatcgagaaacgcttagcccatgattgcggaatcatataaaaagctctcattgccttctgggcggcaataaagcgcaatgacagaacggcaatggtcatcttccccaccatgaaccgacagtaccgcgaaagagaacataacccaggattaagttctaaatcagcacgctaaacagcgtgccaacaccctagttaattaggttgccatctatcaccatcgctgcgagcacattctattctgcttcgctgagaaacaacgcttagcctatcgagatggcaggaagtgaaagtaatttcagataatctagcgagcattctggatagcatatagacctctgtactgatgtatttgtatccgtacgaatctccccattccagagcgactatttccatcaatcgcgcaaacgtggcgcccaaaatacggggaaaaataccaaagccgcggctaacagcataatcattgctaagggtgtaaaatagtttctatagtgaatacagtgcaaccaagctatccaatcatgggaataacgaactgggaaccaatgaacgacagaccaatctgattgcacctaaaggcaatactcaactgacttgttgctgataccaaactatccataacagactgtttaatattgttttgtgcattactattcgcaatagacctgaacagatatttcccgcataagtgattgaataataagaatattgccgttttaatccggcttcctcgcctcgccatatatcgacaattgtaagcgtaatgcctcgttttctatcattatgtaaatactttcgtttccacaaacaccctgtctctttgaaaccgacgttaaaaaaatcacgactgagaaacaacctgacctgcagtgcatatagtcgttaccacaccagctgcaaacattggtgtcaattttcttatcacagggttccttcacggcactatcatctcaaggtgacaggtaacatttctatattattcaaaaaataagcagagaattcataaacaatctgagtgggtcagaattgattcaatctttattgaagagagacaaatgcagattattaattaattctatatacaagttattgtagtgataataagtagaattccactataaattaacaatgtgctgtacgaaattggccttaaaaatgtaattaattaacactggctctttgaattttaagattatttaatatatttaacgagaaaatgagggctacttcggcgggatacgaatgaaaatcagacaataacaggaggtcaggaggtcaggaggtcaggaggtcaggaggtcaggaggtcaggaggtcaggaggtcaggaggtcaggaggtcaggaggtcaggaggtcaggaggtcaggaggtcaggaggtcaggaggtcaggaggtcagggtaatggataataactgcaaaagtgtagcttttatttgtttgatccaaataaaaaacccctcgctttcgcgaagggttatttatttggcaggggcggagagactcgaactcccaacacccggttttggagaccggtgctctaccaattgaactacgcccctaaaagagggtggcggaacggacggggctcgaacccgcgaccccctgcgtgacaggcaggtattctaaccaactgaactaccgctccaccgattctgttacttatacttccgtatatattcccgttagggccagcatgtccttgctgtttagccaccagatgtcactctgataacttgtgtttgatgcctggcagtgtcctactctcgcatggggagaccccacactaccatcggcgctacggcgtttcacttctgagttcggcatgggatcaggtgggaccaccgcgctattgccgccaggcaaattctgtttcaatcaacccgccacgtgatttacaccacacagccagtcaatccaatctgttaacaatgctgaaaatcaaaacgctctctaaaacaccttcggtgttgtaaggttaagcctcacggatcattagtactggttagctcaatgcatcgctgcacttacacacccagcctatcaacgtcatagtctttaacgttccttcagggggcttaaagccccagggaagactcatcttgaggcaagtttcgcgcttagatgctttcagcgcttatcttttccgcatttagctaccgggcaatgccattggcatgacaacccgaacaccagtgatgcgtccactccggtcctctcgtactaggagcagcccctctcaatcttccaacgcccacggcagatagggaccgaactgtctcacgacgttctaaacccagctcgcgtaccactttaaatggcgaacagccatacccttgggacctacttcagccccaggatgtgatgagccgacatcgaggtgccaaacaccgccgtcgatatgaactcttgggcggtatcagcctgttatccccggagtaccttttatccgttgagcgatggcccttccattcagaaccaccggatcactaagacctactttcgtacctgctcgagccgtcactctcgcagtcaagctagcttatgcctttgcactaacctcacgatgtccgaccgtgattagctaaccttcgtgctcctccgttactctttgggaggagaccgccccagtcaaactacccaccagacactgtcctcaccccagattatggggccgagttagaacatcaaacattaaagggtggtatttcaaggttggctccacgcagactggcgtccacgcttcgatgcctcccacctatcctacacatcaaggctcaatgttcagtgtcaagctatagtaaaggttcacggggtctttccgtcttgccgcgggtacactgcatcttcacagcgagttcaatttcactgagtctcgggtggagacagcctggccatcattacgccattcgtgcaggtcggaacttacccgacaaggaatttcgctaccttaggaccgttatagttacggccgccgtttactggggcttcgatcaagagcttcgccttgcggctgaccccatcaattaaccttccagcaccgggcaggcgtcacaccgtatacgtccactttcgtgtttgcacagtgctgtgtttttattaaacagttgcagccagctggtatctgcgactggcttcagctccgagagcaagtctcttcacctagcgccagcgtgccttctcccgaagttacggcaccattttgcctagttccttcacccgagttctctcaagcgcctgagtattctctacctgaccacctgtgtcggtttggggtacgatttaatgttacctgatgcttagaggcttttcctggaagcttggcatcaactacttctgcaccgtagtgcatcgtcatcacgcctcagggttgatggttttccggatttaccaggaatacccccctacacgcttaaaccgggacaaccgtcgcccggctagcctagccttctccgtccccccttcgcagtaacaccaagtacaggaatattaacctgtttcccatcgactacgcttttcagcctcgccttaggggtcgactcaccctgccccgattaacgttggacaggaacccttggtcttccggcgtgcgggtttttcacccgcattatcgttacttatgtcagcattcgcacttctgatacctccagcagtcctcacagactaccttcaacggcttacagaacgctcccctacccaacaacacctaagtgtcgctgccgcagcttcggtgcatggtttagccccgttacatcttccgcgcaggccgactcgaccagtgagctattacgctttctttaaatgatggctgcttctaagccaacatcctggctgtctatgccttcccacatcgtttcccacttaaccatgactttgggaccttagctggcggtctgggttgtttccctcttcacgacggacgttagcacccgccgtgtgtctcccgtgataacattcttcggtattcggagtttgcatcggtttggtaatccgggatggacccctagccgaaacagtgctctacccccgaagatgagttcacgaggcgctacctaaatagctttcggggagaaccagctatctcccggtttgattggcctttcacccccagccacaagtcatccgctaatttttcaacattagtcggttcggtcctccagttagtgttacccaaccttcaacctgcccatggctagatcaccgggtttcgggtctataccttgcaactagacgcccagttaagactcggtttccctacggctcccctatacggttaaccttgctacaaaatataagtcgctgacccattatacaaaaggtacgcagtcacaccacgaaggtgctcccactgcttgtacgtacacggtttcaggttctatttcactcccctcgccggggttcttttcgcctttccctcacggtactggttcactatcggtcagtcaggagtatttagccttggaggatggtccccccatattcagacaggatgtcacgtgtcccgccctactcatcgagttcacagcatgtgcatttttgtgtacgggactatcaccctgtaccgtgcgactttccagacgcttccactaacacacaaactgattcagactctgggctcctccccgttcgctcgccgctactaggggaatctcggttgatttcttttcctcggggtacttagatgtttcagttcccccggttcgcctcgttagactatgtattcatctaacgatagtgcaacgaattgcactgggtttccccattcgggtatcgtcggttgtaacgcttcatatcagcttaccgacgcttttcgcagattagcacgcccttcatcgcctctgactgcctaggcatccaccgtgtacgcttagtcgcttaacctcacaacccgaaggtgtctttcgacatcatcgtgctgcgattattgagagactctacctgcaggtgactccttgtctcggtaaatctacggagagacaagttttagctgcagtgtttcaattttcagcttgttccagattgttaaagagcaatatttcacaacatactgtccaccttgcggcagcaatatattttgaaatagttttatatggtggagctaagcgggatcgaaccgctgacctcctgcgtgcaaggcaggcgctctcccagctgagctatagccccatataaaaagcaaataccttattgctgcaactcatgtccagacaaggcgcagacacgcacgtttattgttataaacgaatgtgacggtaacgcactacagggatgagttggtgggtctgagtggacttgaaccaccgacctcacccttatcaggggtgcgctctaaccacctgagctacagacccaacaaggtactaaagcccgactaatctctcagcccggccttatttgctcgttactttctatcagacaatctgtgtggacactgcgcaatgcgtatcattaggtaaggaggtgatccaaccgcaggttcccctacggttaccttgttacgacttcaccccagtcatgaatcacaaagtggtaagcgccctcccgaaggttaagctacctacttcttttgcaacccactcccatggtgtgacgggcggtgtgtacaaggcccgggaacgtattcaccgtagcattctgatctacgattactagcgattccgacttcatggagtcgagttgcagactccaatccggactacgacagactttatgtggtccgcttgctctcgcgagttcgcttcactttgtatctgccattgtagcacgtgtgtagccctactcgtaagggccatgatgacttgacgtcatccccaccttcctccggtttatcaccggcagtctcccttgagttcccaccatgacgtgctggcaacaaaggataagggttgcgctcgttgcgggacttaacccaacatttcacaacacgagctgacgacagccatgcagcacctgtctcacagttcccgaaggcaccgaagcatctctgctacgttctgtggatgtcaagagtaggtaaggttcttcgcgttgcatcgaattaaaccacatgctccaccgcttgtgcgggcccccgtcaattcatttgagttttaaccttgcggccgtactccccaggcggtcgacttaacgcgttagctccggaagccacgcctcaagggcacaacctccaagtcgacatcgtttacagcgtggactaccagggtatctaatcctgtttgctccccacgctttcgcacctgagcgtcagtctttgtccagggggccgccttcgccaccggtattcctccagatctctacgcatttcaccgctacacctggaattctacccccctctacaagactctagcttgccagtttcaaatgcagttcccaagttaagctcggggatttcacatctgacttaacaaaccgcctgcgtgcgctttacgcccagtaattccgataagcgcttgcaccctccgtattaccgcggctgctggcacggagttagccggtgcttcttctgcgagtaacgtcaatcacttcacgtattaggtgaaatgccttcctcctcgctgaaagtgctttacaacccgaaggccttcttcacacacgcggcatggctgcatcaggcttgcgcccattgtgcaatattccccactgctgcctcccgtaggagtctggaccgtgtctcagttccagtgtggctggtcatcctctcagaccagctagggatcgtcgcctaggtgagccattaccccacctactagctaatcccatctgggcacatccgatggcgtgaggccctaaggtcccccactttgctcttgcgaggttatgcggtattagctaccgtttccagtagttatccccctccatcaggcagtttcccagacattactcacccgtccgccgctcgccggcaaagtagcaagctacttcccgctgccgctcgacttgcatgtgttaggcctgccgccagcgttcaatctgagccatgatcaaactcttcaatttaagatttgtttgatttgctaccgaagtagcgatgctcaaagattactttctgcaaatatgcattcgaaccgaagttcaaatgtttactgctttggtcactcttcaagacttgatatttcttctgcctgccgaaacaggctttgatatcgtcttgcgagtgcccacacagattgtctgataaattgttaaagagcgttcgttacccgttcgcttgcggcgaatcttacggtaacgcgggaggcagataatacgctttcccgctgaagtgtcaagcttttcttttcaactttcgttttaagaaccggcgtttccgcctgcttaacacttcctgacccggcgaagtttgtttcgttgttcccggtcagtggaggcgcattatagggagttcctgacaggctgcaacccctaatttcaaataattttccaaccggcttttttttaggcaaaactccattaaattgcgagttttttcagcattggaaagccataaccctgtaaaacgggcaataaagcatcagtatccgcatctaacgccatgcaataagccacattatcttcctgagtagaaatgacattctcttgtgaagaaatcagccaggcagttctgcgggcaatcgcagcaccggaatcaaccattcgcgtcccctctggcaacacctgcgccagctcttcagctaatagagggaaatgagtacagcctaataccacggtgtccggcggctcacgcatactcagccacggattaaggattttctttaatgcagaaagaggcacttccccaccgtgtaatttggtttccgccagttccaccagctcagatgaacccaacagctcgattttgcaatcagtcgcaaagcgcgcgatcagatccagagtatatgaacggtgcacagttgcccgagttgccaatagcccaacgacaccattgcgggttaaccgcgccgcaggcttgattgcgggtacgacaccaacaacagggaaagagaagcgctcacgtaaagctgggagggaaacggtgctggcggtattacaggcgatgacgacaatggcaaggggatgttgttgctgaaccgcagtgacgatctctactacacgctcgacaataaactcttcggacttctctccataaggaaaggcgacgttatcgaaagcatatatatagtgaagatccggcagaagctgccgaatctcttggtacacagacagcccgccgacgccggaatcaaaaatcagcgccgtcggacgaatggaagtgtctgccttagaagttatagcttccagtgaagtagtattcgcgtcctggggtttggtagccataaaccgtctcataatctttatcaaacaggttggcgattctaccacgaaccgtaagatgagaggtgactggatatgacacagcaagatcccacaagcttacaccaccgagttttaccgttctttcagggtaaacactgtagtctttgtcataacgctgcccaagatactgataggttatagaccaatccaaatcagcaacttgccagtccaactggtatttaacctgttgtttagcacgacgagtcagaacttcattagtttccgcattgcgtggatccagatattccaaagtaagctgatgcgataacggtccggtatcgaatgaacctgtccattccacgcccttaatggtggcttgattgacgttgaaatagctactggtcagattgctgtaatcaataagttgttcaatatcattacggtaagcggacaagcgccagtttaacgccccggtcagcccttcgatacccccttcccattgcttgctttcttctggcttgagattggcattaccaccgaaagcactatatagctgcatcaggttaggggctttataggccgttccataggaaccgataagccgatagccctcaacaaactcccaaccagcactggtttgccatgtggaatgccagccaaattgggaattatcgtcgcttcgcactgagccttccaaggtaacatcactaacttgctgctgccctgtcagataaataccggtattacgctgtgtaaaatcagaggtggtattcgaattgctactcttacgctcggttttctgctcctgccaatcagctccagcggcgatcgtgccattcgccacctggaaagtattaccccactgtaggttatattgctcagcatcgtctaaagaggcggtaatatcatgggggccaaagagtgggctgtaattataatctttggtgcggttatagctggctatcagctgagaggcataaataccgtttttatagcgtagccccgtatcataggtgcgactagacaatttacgcgtatctatcagtgctaatgggttactgaaattagcatagccgtcatagtcactgcggttatcgaaaccgtatacacgggcaaaaccattaaactgctcgttaaattgatgctctaatcctgcccacagcatttttcccataaaaccatcgcggtcaggctgacgtgggccaccagcttccggcatccccgctacaatgtcatatcctttggtgtaggtataattaccagccaaagtgattgtagtgtcttcacccaacttttgctgtgttgaaccatcgtaggtttgataaccgtgagaacccagccctgcagataaagttgtgcccgggttctcacgcgcggtaagaatgttaacaaccccgccaatcgcatcagagccatataccgcagagcgtggcccacgaatatattcaatacgttgtaccaacgaaatcggaatttggctgagatccgatgcgccagtgatcccggcctgatttaatcgaacaccgtcgatcaaaaccagcacatgccgggattcggtgccacggataaacaacgagctacgctgccccataccaccgtcttgcgcaatatcaacacccggtaaacggcgtaaaacatcattaatactggtcgcctgccagcgcacaatatcctcacgggttacgatattcattggcgctaatacgctggatattggctgagggaagcggtttgcagtgaccaccatttggtctctagtgtcagaagaggtgttggaactgtcttgcgcccagccagaaaaggctgtcacagatagagccgtgaacagcgtatattttttaattgtcatgaaaagcatccaaacttaattggcggatgccgcagaaccatggccggtagcacgcgacggccacaaatattgcgacgtaataccggcaggttttcgggcttgggatttattgcctcaacctccttattaaagtgcgaactcttaatagatgaggtaaagcaataccgggcgatgacttcccatccgctatggacagtgtctgttaataaactatcgccgtgacttccccttaccgctgcgcgtcagctctggattcacaccagattcccatttcactctcagctggaggccggacggcaatgctacgatcaacataaatagatgtctagactgctatgattgtaacgaggaataaacacgacaaaactggacttcatagtcacatcccctacaatcccgcaggaataaccatcctttttactgccagacgagacgaaacatgacccccgacatcctgcctactgaaaattacgatcaccaattggcggagaaaattgcctctctcaaagagatgatgtcgccgttcaaggcacctgaaccggaggtttttcgttctccggcagaacattaccgtatgagagccgagtttcgcgtttggcatgatgaagatgagctgtaccacatcatgtttgatcagcacaccaagcagcgtattcgcgttgaacaattccctgtcgccagcgtactgatcaaccgtctgatgagcgcgctaatgaccgctatccgcgcgcagcctattttgcgtcgcaaactgttccagattgattacctatcaacacgcagcggcaaaatcattgcttctttactgtatcaccgtcaattggacgaagaatggcaacagcacgccatggcattgcgggatcagctgcgtgctgaaggctttgatttacaattgattggtcgcgccgctaaaaccaaaatcatgttagatcatgactatgtcgatgaaattctaccggtcgctggccgcgatatgatttatcgtcaggtagaaaacagctttacccaaccaaacgccgcggtaaatattcacatgctggagtgggcgctggacgtcactcaaggtgctagcggcgatctgttagagctgtattgcggtaacggtaatttctctttggcattggcgcgaaattttgatcgggtactggctaccgagattgctaaaccttccgttgcagcggcacaatttaatattgcggctaaccatattgataacgtgcagattattcgtatgtcggcggaagagtttactcaggccatgcagggcgtacgtgagttcaatcgcctgaaaggtattgatctgaaaagctataactgcgaaaccatttttgtcgatcctccacgcagtggcctggatgacgaaaccatcaagatggtgcaagaatatccacgtattctctatatttcctgtaacccggaaacgctgcgagctaatctagaacaactacaacacactcataaaatcagtcggctggcgctattcgaccaattcccttatacccatcatatggaatgcggtgtgtggctggaaaaacgcgactaatcagacagcaaaaagggcaacatagcgttgcccttctgatttcagcctaatggattcccactcaatatttcatgccataagcgggtatttcactgtgattctgttgctgctgctttacgcgccttcagtttgaagaaaatccagaataccaatatcacacacaggatagacggcaaaaaattcgagcctatctgcggatactcgacccgaataatggcactgtaggccagaatacccagcaggaaacacgccgaagccagtttaggcagccccaacggcattgggtagttaagataacgctgatgcagacagtaaacggccagaaccaaagccagcaacgggaatagcgaaaaagaaacgaatgagctaaacaatgcggcaaaagaaccgtttactgcaagcccggcaatcaacgccaatataagggtgccattttcacggcgaggttgttccatcatcttcttccttactttacttttcttcaacacgggatacagcaagcctttcctgttcacggcgataccaataataagcgcccttggaaatcatccgtaactgcaagactaaccgctcctctaactgtcgccgttgttcaatatcaacgtccagcacttccgcaccggcactgaacacaattgtgaccatggcctcagcctgcgcttcggtgaagctgcgcggcatatgattttccaattcgagatagtcggccagttctgcaataaaatgctgaatttcgcgggctacagcggcacggaaagccgccgaggtaccggaacgctcccgtagtagcaaacggaaggcattcggattgtttccaataaactccataaaggttgagaccgaggtgcggataacgctaccgcctttggctatgcgttggcgagcctggcgcatcagttgacgcaacatcaggccactttcatccaccatagtcaggcccagttcatctacatcgcggaagtggcggtaaaatgaagtaggcgcaataccggcttcgcgggaaacttcccgcagactcaagctagcgaaactccgctccgcactcagttggctgaacgccgcttcgatcagggaacgacgcgttcgctctttttgttgtgctctgacgcccataatcgtacccaaaagatatccattttctttagctaagccatatagtaagcaatataccaaactttatagtaacaacgactatacaaacacatcatccttatccgcgtaagaacgaatttacagcaggagccaaagccaactgcctaatgatgattgggttatttataggatgatgttaatgtatcgttgtaattttgtataaaaataggtctctcctacatgcaacagcacttccattttgatgccatcgttattggctcgggccctggcggtgaaggtgccgctatgggattggtgaaacaaggggctcgcgttgccgtgattgaacggtataacaatgtgggcggtggatgtacccactggggtaccattccttccaaagccctgcgccatgccgttagccgtattattgaattcaaccagaacccactttacagcgacaactcgcgtgccatcagctcctctttctccgatattttgcgccacgccgatcgggtcattaaccagcaaacccgcatgcgacaaggtttttacgatcgtaaccattgtcagatgttttccggtgatgccagctttgtcgacgccaaaacccttaacgtacgttacgccgacggcacgtccgatcgcctgacggccgataacatcgttatcgcgaccggttcgcggccttatcgcccggagaacgttgattttacccacgagcgtatttacgacagcgacactattttgcagctcagccacgagccacagcacgtcattatttacggtgcgggagtgattggctgtgaatatgcatcgatcttccggggattgagcgtcaaagttgatttaatcaacacccgtgatcgtctgctggcatttctcgatcaggaaatgtccgatgcgctctcctatcacttctggaataacggcgtggttatccgccacaacgaagagtttgagcagattgaaggcactcctgatggcgttatcgtccacctgaagtccggcaagaaagtgaaagccgattgcctgctgtatgccaacgggcgtaccggcaacaccagcggactcggtttggaaaatatcggtctggaagcggacagtcgtggtctgctgaaggtcaatagcatgtaccaaaccgcgttgcctcatgtctatgccgtaggagatgtgattggctatccaagtctggcatccgccgcttacgatcagggccgaattgctgcgcaggccatgattcaaggggaagcgcaggttcatctgattgatgatattcctaccggaatttataccattcctgaaatcagctccgtcgggaaaactgagcaggaactgacagcgatgaaagtgccttatgaagttggccgggcgcagtttaagcatttggctcgggcgcagatcgtcggtatggatgttggtagcctgaaaattttattccatcgggaaaccaaacagattttgggtattcattgctttggcgaacgcgccgcagagattattcatatcggtcaggccattatggaacaaaaaggtgaaggtaataccctggagtatttcgtgaatactaccttcaactatccaaccatggccgaagcctatcgcgttgcggctctcaatggcttaaaccgcctgttctaacggcgcgctcatgcgaatttgcatgtgatcgcgtatcgcctcggctagttgctcatagcggccacgcaatggggagccggggcgataaaccagagcaatagtgcgcttcggctccggtttgtagcattccagatagcagacaccgtcgcgctctttttcttttggtaccgccagtgatggcaataaggtgatgccgctgcccgccgcgaccatattgcgcagagtttctaaactggtcgcgcgaaaatgggtatcttcctcagcacccgcctggaagcaaaaacccattgcctgatcgcgcaagcagtgaccatcttccagcatcaataatttttctcctgctaattcatgcatttgcacgcggtcacgcttcgcccatggatggtcggaataaaccgccagattcattggctcatcaaataacggcacttcgataaaagcttcggtctctttgaccaacgctaaaatagcgcaatccagtttaccgctgtccagctgtgccaacagattatgagtctgcgcctcgtgtagatacatctccagctttggaaaagcctgatgcagcatcggaataatttgaggtaataaatatggcccgacagtgggaatcaaaccaatatgtagcggcccggacatactctcgccctgcaaactggccatctctttgagcacttttacttcccgcaatacggttctggcctgatccaccaacagcaagccagcctgggtaaacagcaccttacggctggttcgctccagcagcatcacacccagttcatcttccaacttacgaatctggccgcttaaggtcggctggctgacatggcaggaatccgcagcacgtcggaaatgacgaaactcggccaaagccaccagatactcgagatcgcgaatgttcatctgctctccactttatgatagtcaataacgataggtaagatagcaaccagtgattagatctatcaagagataaagtaaataatgtgtctcaagaaagaaaagcctaactaaatgaaaaattatgttttctaattaaggagttacacatgtttaccagccaagaaggtaaaaaagtcccacaggttactttccatacccgtcagggcgaccagtgggttgacgtaacgactgatgacctgtttaaagataaaaccgttatcgtattttcactgccgggcgcgttcaccccgacctgttcttccagccatttaccgcgctacaacgagttatccggcgtgttcaaacagcatggcgtagacagcattctgtgcatttcggtcaacgacactttcgtaatgaacgcctggaaagccgaccaacatgccgaaaatattactttcgtgccagacggcaacggtgaattcaccaaaggcatgaacatgctggtagagaaggccgaccttggctttggcccacgctcatggcgttactccatgctggtacgcaacggcgtggtagaaaaaatgttcgttgaaccaaacaaaccgggcgatccgtttgaagtgtccgacgctgacaccatgctgaaatatttagcgccagaatacaaagtgcaggaatccgtggctattttcaccaaaccgggctgcccattctgtgctaaagcgaaacaaatgttgcaggatcgcggtatacaatatgaagaaatcgtactgggtaaagacgcaactaccgtgagtctgcgcgccgtcagcggccgttcaactgtaccgcaagtgtttatcggtggccgtcatattggtggcagcgacgatttagaaacctatctgccagcctgattacatcaataaaaaagaagccaacgtgaagtattttggtaggcctcggcctacccttttttcctgttaggagcggatatgaaaaccttaaacgtagatgtcgccgtaatcggtggcggcaccgccggtctgggcgcttatcgcgcagctaaactttccacccccagcgtggtaatgattgaaggcggcgaatacggcacaacctgtgcccgcgtaggctgtatgccttccaagttattgattgcagccgccgaagcggtgcatgaaattgaaaaggcgcccggctttgggatctatccgcagggaaaaacgctgattaatggacgcgaagtcatggatcgcgtgaaacgtgaacgtgaccgtttcgtaggcttcgtattggaaggtgtcgagagcattcctgccgtggataaaattcagggctacgctcgctttattgatgacaacaccctgcaagtggacgatcacacccgtatcgtagcgcaacgtattgttatcgcaacgggttctcgtccgagctggcctgcaccctggaacgatttgggcgatcgccttatcgtgaacgacgatgtattcagctgggatgacttacctgaatccgtcgccgtgttcggccctggcgtgattggcctcgaattaggccaagccctacaccgcttgggcgtaaaagtaaaaatgtttggcgtgggtggagccgttggcccgctaactgatagcgtagtacgcgaatacgccgccaacacgctaggcgatgagttctatctcgatcctgatgtaaaagtcgaattgattcagcgagaaggcgataaagtctttattcgctatcaaaatctggatggagaaatgcaggaaatcatggtggactacgtattggccgccaccggtcgccgtccgaacgtcgataaattagggctggaaaataccggtctggagctagatgagcgcggtgtacctaaagccgaccgattaaccatgcaaaccagcgtaccgcatatttttatcgccggcgatgccagtaatcagcttcctttattacatgaagccagcgatcaggcacgcattgccggtgcaaatgccggtagtttcccggaagtgttgcccggtttacgccgaagcccgatttccgtcgtattttccgatccgcaaatcgcaatggtaggttcgactttccgtcaattgagccagaaattcagcgtctgcggctgttttgaaatcggtgaagtttctttcgagaatcaggggcgttcacgagttatgctgcgtaataaaggcatactgcgggtttacggcgagcagggtacagggcgcttcctcggagccgaaatgataggaccaagcgctgagcatattgctcacttgctggcttgggcacatcagcagcaaatgaccatcgaccagatgctggatatgccgttctatcacccggtgattgaagagggtttacgtaccgcactgcgtgacctgcaatccaagctgaaacttggaaccgacgaggcagaacgctgcctacgttgtccgggcgagtaattcgcctctctattacctttctctcagcaaaaaccggggtcttgcccggtttttgctttctacattctttttctccgcgccgaatttaaattatttctgcgggacgcctccctgaaaagctccgccctgattgccccgctgcaaaaaattccccactgtacttttctcaccgcgaataacagagatgtacttgaaacagtattaacagtactgcattggaattggaggcgtaatgaaaggcatggaaagccggattgctcgtatcaaagcgaacccatcgggagtgaagttcagtgaactggcaaaaatttgcagttattacttaggaccacctcgacacaactcaggcaatcatcatgtctacagcatgccttggcaaggcgacccacgaattaacattcaactcggcaataacggaatgtcgaagttttatcaagtgaaacaagtaattacatctctaggaaagttagaggagatgatccatggttaatattgaacactacacctaccgcattacctggtcggcagaggacgcggaatttattggtttatgcgccgaattccccagcgtgtcatggttagcgcctaccagagtacaggcgctggatggaataacggtagtagtggcagatattctggccaaaatggttcgctccggtgaaacaccgccgataccgttatcagagaagcacttcagcgggaaattagtgctgcgtatgcctcccgaccaacatcggcgtttagccatcaatgcgacaggagaagggattagcttaaatcgttatttatgctcacgtttggcctgttagtcacagaaatcgtctcgttagagtctgctcgccaatgggcttgctgtgtgcaacaaaactaaccgactgagcttgtattcgcaaagctggaaactcgtttaggcagttggtgaatgcgtgatgagcgccgaaagtacatatttatctggcggcttcggctctctgttttatctcgaaatctaccggcagcgagataatcacctgcccaccagataacaattcagtcggcggaaaaggtaggggctgggcacgttttaaaatagctaatgcctcacgatctaataaaagagtgccgctgctactggtcaaagtagcggatagcactcgccctttgctatcaacgataaatttaacgatcgcggtgccctgccgcttttgctttctggctccgggagggtagcgcttgaagttagctaaatggctttgtaaaacgccagcccagtttgctcgtgcctgaacatgttgtaatgagtgactattattaggtgccgatacgcgctgggctgtccctgataacggcgaactcttgctcatcacagtcgacagtctttcattattttcttgatttataacggttttagatttaagcgcgttagccttttcacttggcttttttgctattttcggttttagtttcaaggcgggtaatacggaatcaagggaaggctcttctgccaaaaagttattattttcaatatgttgttctgtctgcgattcaccgacgggtaaagttggctcttgttcaacgcctacctgaattttttcaaggcttggtgcaaattctgcttccgctgacagcgttagcactacggcggacagggaatctggcggtaacggagaaacagatcgctctgccaaaaaccacagcccggtcaaatgcaacgcaaaagataacaacccgccgcaccacaaagatatcgccgaggagccacgacaaactgaagagtgagtattttccacggataaaatcatcacattcctttgttattcaattaatagcgtaactttcattaggtaagagcagccgtttactcttctgccaacgcggcatacagacgatcggccaagggtttcagtaaatagctcagtagtgaacgctctccggtgcgaataaaaatatcgacggacatacctgactggattttttctgtgtgagtttgctgtgcttcatccgtattgatcgacacagttaatggataatagggctgtaagctgcttgggttattcaatcggtcagcgcctatatgcagaacgcttccctgcaatcgaggagaatggctttggttgaaagcggaaaaaataagttctacaggtaaatctaccgcaactttatcgattaattcgatgggtagctgagcttcaatcaacagtgggcgcccgctaggaacaatttccatcagttgctgcccaaagccgataacgccccccacggtgtgctgtgccaaggcgataatgatgccgctttctggtgcataaatgcgcatattggccagatcatattccgctacgcgaatttgctgatctaaatcctgcaaccgtcgctgagttttagctaactgctcatgaatatctgcctgatattgctcaacctgctgtaataatcgttgctcattcgccttaatttgctgacaagtttcactaatatggccacggtgctgatccaccaaagccttcaatgcaatagcctggctttccatatcaagctggtgtttaagcgccacatagccgctttttgccagcgtacgcacaccttttaactgttgctgaattaaatcggactgaagttggttatttgctcgttgtctatgcaacccggcatggcgagcgcgtaaaagagctatttccgctgacaaacgcgctatttccgcttgttgagcctgatatcggtggtagaaaagttgctgttgtaaaaccatgagctcagcaatatggggcttctcacgctgcgttaataatgcgactggaaagcggatctccgcctcatgatttttctcagcaattaaacgcgcctctagcgagagtaaggaaaaatactgctgctgtagattatctcgctgactccgttccgttgtatcatccagcgaaatcagcaattgtcccttttctacccatttaccttcggcaatatgtagctgactgattcgcccgctttgcgaagactgaaccacctttctattttctgtgaccaccacaactccggcgacagcgacgcctttatctagtggcgcaaaaccggcccaaataaaaaaaccaataaaccaaatcaacaccagcagcccgccaatataaagatagcgtccgctattaatttgcagcggttcctgagcggtggcaaacggcatgatttcgcccctttccgtggcttttggattagtcaccttgtgatgttctcccggcgggaacaaaccgataattcgccacgttaccccagacattttttttatctgcttttcgcgtcgaagcgatattatctttggcgtaaaaactgctgagcactgccgcagtgcgatcaaacagctgctgttgcccgttttttagaagcaataaaaaatcactgccagacaataattcaggcttatgagtgatcataaccaccgtactaccctgccgttttagctgttcaatgctcgctaataacgccttttctccgccttcatctaggctggcattcggttcatccaacacaatcagccgcggcatcccgtacatagcccgcgccagcgcaattctctggctctgtcctccggacagtccttccccaccatcacccagctgagtgtcataaccctttggcaaatgtagaatcaaatcatgcacatccgccatctttgcagcagccacaatctgggatgaatccagcacgccaaaacgagcaatattttcagccaccgacccttggaataactgcacatcttgtggcagatagccgatgaattttcccagtaaggatttgttccaatgagaaatttctgctccatctagtcgtattgatccactgaatgctgtctgactagcaaccagtaacctcgccagcgtggatttaccgcttcctgatggccccaaaacgccaagaacctcccccggttgcagggtaaaattgacggaatgcaggataggaaccgaagtgccagctcggcaggcgagtaattgagtgacggttaactgacccagagggtcaggcaaaactatttctgtcgtcaatgaggattgctgattagccagcaaatcagttaaacgctgataagccagacgggcatggctccagtgtttccagactgcaatcaattgatcgatcggccccaatactcgcccgatcaatattgatcccgcaatcatcactccagccgtaatttctcctcgaataaccagcaatgatcctaatcccagcatcattgattgcagcgttaacttgctggacttggctaacgcactaatgcggctgcttctgtcactggcaatattttgcagataaaggaagcggcaatgctgagttagccatcgttcccgcaaagcttttagcatccccatcgccgcgatggtatcggcattacgtaaatgggcgtttgcctgcaaagttgcccgcgaagtgatttcagaggcctgttttaatggttttttacatgcccagtgattagtgcaagccagtagaatcagcacgcctgccccaatggttgccatcgctccaagccaagggtgcagcagataaatcaccaataaatagaagggaaaccagggcgcatcaaaaatggcaaacaacgcattgccggtggcgaactggcgtagcgtcgtcagatcgttaagtgcctgcgcggcctgaattttgttaccttgcaaaattgattggaaggtcgagttaaacacctgctgattcaactgcatatcggctctggtgcctaaacgaataacgacggctcctctcacccattctaataagccaatcaaagcaaaagcgcccaaaactaataaagtcagcatcagtaacgtcatggtgtttgctgaggccaagacgcgctcgtagacctgtaacatatatattgcgggagccaacatcagcaaattgataattgcggtgaatatccctattccccatagactggttttatcacagattaaaaccgctaaaatcggaggtaaggtcgtttgagaggtattagctaatggcatgggtccgtttccacactgtaatcacacttttaattcgcaccgcagctaccattccaaaagagcagtacaactcgtaaaaatgcttgaacaatgtatatcaaaatcaccaccgcaccttatttccctattggcacggcggtgacattttcattcagtcaaaggggtatttcccagcagcgctttatcaggcggctaacaacatttcgttgtactctgccacaccaattgcttcgataaatggtgcgtcatctatcacgtcgccagaattatactggctagctatagataacgtgttgaaggcgctgtcaacatccaccccactcgttttgagaatttccagcatcggatcagggtctcctttcattaaaccgtataacgttttgtgcaaatcgctctgatgattttgttcctcagtgagcgcaggatcatattgcccagtgatagccagaccactaaaggtgacctccgtttttacgatgtgtcttcccccgccgacgctaggttctagcccttcaccaaactgcacctcatcaatattgccatggagcgtatgctgaggataaaaggtgtaatgtaagttacccttcgctatcaggctggtttccgtattatgcgaactgccaatagtaaattgatggccattaaaaccatccgatcccccgtaaaattgcccacgatctttaaccggagccagttcgatattaccgaaccccgcagcccacgcttttaggtaagatgaaacactaaattcggcaaattcttcttggtatttaattgttatactcataaataatttccttttagtaaatgggatataacttagaatatgattattaatataaccatacataccaacaggggttaattaacacacctgaagactttaaaatttgtattcaaatccaccctgaatagttcggccacggctagcagaaaatgacagtgaatcgccataattaaccagataagcacgattactgatattttctattgaagtacgtaatatcaaattatttgttattttatagctggcatataaatcaaacactatgtatttcggccagtcagcgacataagccgtacctggatagccataaccattaagcactgataaatcttgatacccacggttataacggattacggtaccaaaatctaacagtttatttaatgctcttccccccaacgttaaactgccacgatcgcccggtaaataagctgatgatccgaataccgccccatgtctacagagaatgaaatcattaagatggttaccatcgacaccatacattcctatcccttttgtatttttaaccgattgaataccgcccaaccaggctggttttgagcaagtatcgttatgacctatcattcgggtataattcagactggtataaaaaaaaccggcatcgtaacttaattgatattccaatccgcgaaagcgacttttaagtaaattattaacgtaagcagcataggcaaatgattggcttccgcgcagaggtaatgctcgctctaattccaagttgatatagttcgtcacccgggtatcaaagtaggccatttttgcgccaaatttatcgccgctaatgaataaatcttcctgttgaatattcaacccagattcccaggtgcgggagcgctctatggccagattaggatttgggaacaaaaaacccgaaccgtgggcactgccggtagccagagtttctgttatacccggtggccgccatgattgaccgtagttgccaaaaaactccagccattgcactcctggcttcaccccaatgcccaaggttggcaatatttgctgctcatggcgatcaacatcccaggtcattgtcacagggacttttttacaggtatttctttttcccccgccatgttgggggttacatgggttttgccgtgtataaggcatttttgatgtgtatagccaggtatgcccttgtaatcgagaatgttcgaaacgcagcccgccatccagccgtaaccagtcatcgtagtggtaatcaaactgagtgaaaacgctagtcagactgcgctggccagacggagtcacaccctgcatgagatctttgttcgtgtggccgctggaacgatcgctaaaccaatccataccatattgaaggctcaataaatggttatccggcagcatgaaacgttgagtattttgtagctggagaccgcgcgtagttaaacgcgtgcgagtggtatatttccgacagaaaataggatcagaacacaaagtattggttttatcatcggtatcaacgtaataggcttttgccttggcatccaaccagggtagatgctcgggctgtaagctgtaatccaatccgaaattctgcgttatgacatcgctaatactgctggttttccagccgacgccgcttttattcggtgagttttttacacttaccagaaagccgccgttagggctgcttacctgagtttgcaggtaactggcaaccaaacgctgctccgcaggcaagttccagcccactttagccagtcgggtatgcatttggtagccggaattgagcactttcatgtgctttaactcatcaccgattgagtttttccccttatttccatatccaaaacgtagctcgcccagactaccgatgtttcccggccaataatcaccaaagttccgctcacttatggctatcaataaatctccggtttcatgaccaaatgccaatgttccgccacctataaatcgggtaccgttatcgcccgttgtggctcgcagattaccgccaagctcttttcctggctcaagaaaatccgccgcgtttatcgtattaaaagtagcaataccgccaattacgccggcgctaccgataccgctggtcggccctttttcaatcaccacattgctaagaatatccggatcaataaacatcacgccgttacgtccgccgtgaccacttttcataaagttttgccgcataccgtcaatattcatatttatacgaccaaaatcttgaataccgcgaatattgaccgataaagcaggatcttgttggtctacggcagaatagacgccggcagtttgctccaatatatcagccgcatggcgggcaggacggttatctaattgttctttagttatttcactaacagagcgaggttcatcatatatccaatcgtcagaatattgcagaccgccaccttctatttttagcggttctaataccacattattatcatctatctttgaagaggggatattaacatcaagctgttccgagtaacttttatcactaaataaataaaaaataaaaaaaagaatgatactgattaaaccattaggcttaattttattcacataattattatgcatatttttgcttcatccttggaaaaataatgcgacagccaacttagttatttcactaaatcaacagtttaaaaataaagtcttacattagcgctttatttatatttcaacaattgagaatgattatcataatcacttaatgaaataaactcaacttcctacaggaagaaataaagaaatagcgccaatgaatgacagtaaatgtgaatactcgccctaatgctaaaggaatgaatggttaattatcgcagatgaacccaatatattaattaaagggatgtttaattacgactgacagttagcctatagctaacatattcacagggaagggaatatttggcaataaagcggatggtaagcgtgccatccgcaatgcgtaaggaattaattaaaacaaacgctctttagcttcagcaatggctgatgccacctgcagtggcgatacgccgcccttggccacacgtttatccagacaggattgtaaagccagtattgggtacacgtcgtcgctaataatggcgctgaattttcgcaaatcctgcaacggcaacgcttccagtgctttaccctgacgaatggcttcaaccaccgcttcgccgacaatatgatgcgcttcacggaaaggcacgcctttcgctaccagataatccgccaattcggtcgcattcgcataaccctgctcggcagcttctttgcaacgcggacgtttcacctgaataccatccaataccagcgccgccatatgcaggcaatccagccaggtatccaatgcgtcaaacagcccttctttatcttcctgcatatctttgttgtaagccaaaggcaggcctttcaatgtcatcatcatcccggtcaatgcgccttgtacacggccacatttaccccgaatcagttccaacgcatccgggtttttcttctgcggcatcagggaagagcctgaagtgacgcggtcagataaatcgacaaaggccgcttcgccactgttgaagaaaatcaaatcttcggcaaaacgagagagatgaaccataccaatgctggcatttgacagtaattccagcacatggtcgcgatcggaaacactatccagactgttgcgggtcgcagaagcaaaacccagccaatcggccagctgttcgcgatcgatggcgtaagctgttcccgccagcgctccacagcccaatgggctcacgtccaaacgctttaaagtgtcttgcaaccgactttcatcacgagccagcatttcgctataagccaaacaccagtgagcaaaggtcaccggctgagcgcgttgcagatgggtataacccggcatgaccgcgtcctgattggcttccgcagtgataaccaacgcctgttgcagctggcgtaccgccgattgcagctccgtcacttggaatttgcaccatagttttaaatcggtagcgacctgatcgttacggctacgtccggtatgcagctttttacctaaatcgccgactttggcaatcagtttggtttctacccagctatgaatatcttccgcatcgctggtcagaatggcttgtggatcggcctgaacctcttccaataatacggtcaacgcctgttcgagttgtaattgctcttcggcgctcaacacgcctacggtaaccagcgcttttgaccaggcaacagagccgaaaatatcctgttctgccaatcggtaatcaaaccgcagagaatcgttaaattgcttaaaccgctgatctgctgcctgactgaaccgtccgccccacaatgccataacttgatttccttaaactgataaaccgataatcctgataaacgatgctaaaacagtgagatgcgagcgcaagcagagctgcactcgcaaaggtcaccgcattacttcttcgcgttcagcgcacgaatacgggaagacagcgagaacagacggataaagccgccggcgtggctgtgatcgtaaacttcatcttcaccgaaagtagcaaactcttcggaatacaggctgttagaagacgttttctgaattgcagtcacctgacctttatacagttttagaaccacttcaccgttaacttcctgcgccaatacttcggccgcagcctgcaaggattgacgcaatggggcgaaccaacggccatcgtaaaccacgtaggacatttccagacctaactgctcacgccatttaaagctatcgcgatccagcaccagttgctcaacgccacgcagcgcagccatcatgatggtgccccccggcgtttcgtaacagccacgggatttaatgccaaccagacggttttccacgatatcgatacggccaataccgtgtttagcgcccagcgtattcaatgcatccagacattggaacgggctcatcgctttgccattaaccgcaaccactttgcctttttcaacggcaacggtgaccagctcaggttcgtccggcgcgtcttctggcgctacggtccaaacccagcaatctttgtttgaagcattagccgggctttccaacacgccgccttcagtagagatatgccacgcattctcgtcacggctatagattttttccaaggatgccgtagtcggaatatcacgctctttcaggtaatccagcagcgcttcacgggaacgcagatcccactcacgccaaggcgcaaccactttcagttgtggcgccagcgcggtataggtgctttcgaaacgcacctgatcgttacctttaccggtcgcaccgtgggctaccgcatcagcacccagtttcaacgctagctcaacctgcgctttagcaattaacggacgcgccattgaagtgcccagcaggtaagtaccttcgtacagagcgcccgtttgcagcactggatacacgtaatctttgataaattcttcacgcaggtcagccacatagcaggctgaggcacccgttcgcagcgctttttgttcaatcccttccagatcggcacgttcctgcccgatatccgcaacgaaggcgatcacttcgcagttatcatagttttctttcagccatggaatgattgccgaagtatctaagccgccggaataagccagaacaattttgctgatgcctttagtttgcattttcatttccttgaatctcaattcagataaaacaatagaagaagaatctgtaatcaccggagcgacgaggctcaggccagaatacgtgtacctatcggtaccccgttaaacagagcaggaagctggtcagcatgacgccagctggcaatatccaccggacgccccagtgaacgggctgcatccaacgccgcgttcactttcaccaccataccatcagtaataatgccctgagcaatcagttgctctgctttttgcgccgtcatttcggcaatgcgttgccctttgccatccagaatgccgctaacatcagacaacaggattaaatccgcgcctaaggttgccgccagcgcggttgccgcctgatccgcattcacattcattagctcgccagaggcggtaatgccgatagaactaatgatcggcatgtagttagcagccagtagggtttgtactaacgtcggtgaacccggttgagcacctccaacgtgacccaactccgcatctagcggcgttactgtgaccgtattaccatcgcccaaacacaggccaacggcggcgatatgatgtttcaccgcccaggctaacagggttttattggcagtccccgccagtgcaccggtgatgatgtcgatctggtcggccggcgtcacccgcaggccatttttcttcacgacaggcagagccagttttttcatcaagtcgtctaccagacagccgccgccatgcataatgaccagcggacgctgatgcttttcgcggtagatcaccaaggcattaaacaggcgctccaacgcctcttcgctgtccaataacaccccacctaatttaatgactaacggattcatcatggtctgcgcctcaattgcgtcttgaaaatataggggtgagcgagaatacgttgcgggagaatttcgctaccgtccctgattaaagcaaagcctgagtttccgggaaaccaaagcgtatattcatgcactgaacagcctgagctgccgcgcctttcagtaagttatcttccgtcgcgaccacaatcagatgttcgccctgaaccgaaaagccgatatcgcaaaacggtaacccaaccacggctttcagtgcgggaacgccctgctgatacaaacgcaccagaggtttatcctgataggcgttgtgataggcctcggcgatatcctgtgcggtgacgccagcgtttaggcgacaggtaatggtagccagaatgccgcgggcaaaattccccagatgcggagtgaaaatgaccggcgtacccaaatgagccacaatttcaggctgatgacgatgagtaaacaagccgtaaggctgcaaactgacttcgcagaagctgttgccgacgctggctttacgccccgcgccgctcacgccgcttactgcattaatcactggccactgttcctgatttagcaaaccgttttctaccagaggctttaacgccaactgggatgccgtgggataacaacccggcacggcaatcaactgagcttgtttaattttatccgcctgccattccgccaggccgtaaactgcctgctccagccattcggcatgctgatgttcaaaaccgtaataagtggtataaaaatcagggtcctgtacgcgatacgcaccggacaaatcgaatactacgcagcccgccgctagaaattgcggagccaaatcgtggctaacttcatgagcggttgccagaaacaccacatccacgtttttcgcagcttgagccacatcaaccaagggttgcagcggtaaatcgatgatgccttttaactgcgggtgcagatcggaaagcaattttcctgcatctgcactttgcgctgaaaccgttaaaccggttatgttcatatgtgggtgacgattcaggtaagccgtaagttcagctccggcataaccgctggcaccaacaatcagcgtattcaacatggattcagttcaccttctgactaactgtacataagtacgcaaaacgagttgcagggtttatcagcaagtttttactgtttccctacgcgattgagcattgacattttcgtaaattcaagggcgtttctggttcccttacgctcatgcttgctgtattttcattcaaatagttattcacaataactgcatgaatattgatactaccctaaccaaaggctgtcaacagtgaagatgaaattacctccatttattgagctgtaccgggcgttaatcgcaacgccctctattagcgcaaccgatagcgctctggatcaaagtaatgaagcgttaatcaacttgttggccgaatggtttagcgaactaggttttcgcgtggaaatccaaccagtgccggaatcccgcaacaaattcaacctgctggccagcattggtgaaggcagcggcgggctgctgctggcgggtcataccgatacagtaccttacgatgaaggccgctggacgcgcgatccgttcactttgagcgaacatgacaacaagctgtacggtttaggtactgcggatatgaaaggcttctttgcctttattctggatgcggtgcgcgatatcgacgccagtaaactgaccaaaccgctgtatattctggctaccgcggatgaagaaacgactatggccggagcgcgttattttgcggcttccacccaactacgccccgattttgccattatcggcgagccaacctcgctgaaaccggtgcgtgcccataaaggccatatttctagcgctattcgcatcgtgggtcagtccggtcactccagcgatccggcgcgcggcgtcaacgccatagatctgatgcatgaatccatcacccatttgatggcgctacgcaacacattgcaggagcgttacaacaatccggccttcaatattccctatcccaccatgaactttggccacatctccggcggtgacgcggcaaaccgtatttgtgcctgctgtgaattacatatggatattcgcccgctaccggggctgacgttgagcgatttaagcgaattgatgaatgaagcgctggcaccggtgagccaacgctggccgggtcgcttgaccatcgacgagctacacccgccgattccgggttacgaatgcccaaccgatcacgctatggtggcggtgattgagaaactgctgggcagccgtaccgaggtggtgaattactgcaccgaagcaccgtttattcagcaggtatgccctacactggtgcttggccctggctcgattaatcaggcacatcagccagatgaatatatagacaccgcttttattgaaccgacccgcgagctgatttcccagttggtcgatcacttctgccagcagtaagcaagctacccgaacgcatgtgttatcgggtaagcacgtgttatcagataaaaaagtggatgggagatcgctacccatccacagatagcccatttcgatcaatatcgatgattagccagactgataacctgcgaccagtaattaaatttcagaaatacccccaattttgatgtttttttgctaaaaatagtgtcaattgggttattggaattgaacgcggcgagattcgtaatcagtctcagcctcttgggtgaaattaatttacaaaaagaaaccataaaaggttatacctctaattatgagggttataggcaagcggccaacaaacgcatccgatgagcttactctggtcagccattcacatgagcgagcgtaaccaacatgtctgtaacctcaaatacgcagggtatatatgggtcaggggtcatatgaacgaacaatattccgcaatgcgaagtaacgtcagtatgctcggcacactactcggagacacaattaaggaagcgctgggcgagcacatccttgaccgggtagaaaccattcgtaagttatctaaatcttcgcgagccggtaatgaagcgcaccgtcaggagctgctttcgacgctgcaaaacctttctaacgacgagttattgcccgtcgctcgtgcgtttagccagtttcttaatctgacgaacaccgctgagcaataccacagcatttcgccgcatggtgaagcggcaagtaatccagaagccttggcccagctgtttaatcgtctgaaagataagaatctaagcaataaggatatgtgcaaagcggtggatgaactgtccatcgaactagttcttactgcgcatccaaccgaaattacccgccgtactctgattcataaactggttgaagtgaatacttgcctgagccagttggatcacaatgatttagccgattacgaacgcaacaagatcatgcgtcgtttgcggcagttagttgcacaatcttggcataccgacgaaattcgcaaactgcgaccgtcacctatcgacgaggccaaatggggttttgccgttgttgaaaacagtctgtgggaaggggttccggctttcctgcgtgaattcaatgagcagttggaaaattctctcgattaccgactgccggtagaagcggtgccgattcgctttacctcgtggatgggcggcgaccgcgacggcaacccgaacgttaccgccgaagtcacccgccacgttctgctactcagccgctggaaagcgaccgatctgttcttgcgcgatattcaggtgctggtttccgaactgtcgatgtcggaatgtacaccggaactacgcaaactggccggtggcaaagaggtgctggaaccttatcgcgaattgatgaaacgaattcgtacccagctaatcaacacccaaacttatctggaaggccgcctgaaaggcgatcgcgtattacctccggaagatctgttgatcagcaatgaacaactgtgggaaccgttgtatgccagctatcaatcgctaaaagcctgtgggatggaaattatcgccaacggccagttgctggatacgctgcgccgcgtgcgctgcttcggcgtgccgctggtgcgtatcgacgttcgtcaagaaagtacccgtcacaccgatgctattgccgaactgactcgctatttgggtctgggtgattatgaaagctggtcagaatcagataaacaagcgttcctgattcgcgaacttaactccaagcgcccgctggtaccattaaagtgggagcccagcgccgagactcaggaagtgctggaaacctgccgggttatcgccgaagcgccggaaggctccatcgccgcttacgtgatttccatggcgaaagtcccttctgacgtactggccgtgcatttactgctcaaagaagccggttgtccattcactctgcccgttgcgccgctgtttgaaactctcgacgatctgaataacgccgatgacgtgatgaaacagttgctaagcattgactggtatcgcggcctgattcagggcaaacagatggttatgatcggttattccgattcagccaaagacgcgggtgtcatggccgcttcgtgggcgcagtatcgtgctcaggatgccttaattaaaacctgtgagaaagccggtgtcgctttgacgctgttccacggtcgcggcggttctatcggtcgcggtggcgcacctgctcatgcggcgctgctctcccagcctccgggtagcctgaaaggtggcctgcgcgtcaccgagcaaggcgaaatgattcgctttaaattcggtttacctgaagtcactatcagcagtctggcgctgtacgccggggcgattctggaagccaatctattgccaccgccggaaccgaagaaagagtgggtcgaagtcatggatctactgtctgaggcatcctgtgatatgtatcgcggctatattcgtgaaaatcctgactttgtgccttatttccgtgcggcaacgccggaactggaattgggcaaattgccgttgggttctcgcccggcgaaacgccgcccgaacggtggtgtggaaagtctgcgcgctattccgtggattttcgcctggacgcaaaaccgcctgatgctgcccgcttggctgggtgccggggccggtttgcaaaaagccattgatgcaggaaaacaggatgagctggcaaccatgtgccgcgattggccattcttctccactcgcatcggcatgctggaaatggtcttcgctaaagccgatctgtggctggctgaatattacgatcagcgtttggtcgacaaaaagctctggccgttaggtaagcaattgcgcgatcagctcgccgccgatattaaagtggtgttaaccatcgccaatgacgatcatttgatggccgatctaccgtggattgccgaatctatcgcgttacgcaacgtttataccgatccattgaacgtgcttcaggcggaattactgcaccgttcccgtcagcaggaacatccggatgcccgcgttgaacaggcgttgatggtgactattgctggcgtcgccgcaggtatgcgtaataccggctagtttctgatgggggagcaatcccccaaatgatgaaatcgcaaaatcgttattgtaaggacgacaaaggggctaattagccccttttgcatattgaaatctataatgtcgacaataagttaaggcctaacacccaaagtatggcaaatggcgtagctcatttctgcccgattcagggtatagaaatggaaatcctttactccttcgcggctcagaattttcaccatatccatagcgatagaagcgcccagcattttgcgcgtctcagggtcgttatccagcccttcaaatacgctggtcatccaatgaggaacgcgcacgttggtcatggtggcaaagcgctgtagctgcttaaagttggataccggcaaaattcccggcacgatttctacgtcaattcccgtcgccacacagcgatcgcgaaaacgcaggtaactttctacgtcgaagaaaaactgagtaatggcacggttagcaccggcatcaatcttacgcttaagattaatcaaatccgcctgagcgctcttagcctcaggatgtacttccggataagctgccacggaaatatcaaaatcgccgacgtctttcagcaaagcaaccagatcggttgcatacatttccggcttaccgctgccctccggcaaatcaccgcgtaacgccacaatatgacgaatgccattgcgccagtaatcctgcgcaatctcacgcagctcacccgccgaggcgtcaatgcaggtcaaatgcggtgcagcatccagaccggtacgctctttaatgtctttaataatgctgtgagtacggtcgcgctcaccggagttagccccgtaagtcactgaaacaaacttaggtttcagtgtgcttaaacggtcaatcgagctccacagggtgtcttccatctcgctggtacgcggcgggaaaaactcgaaagagacgttaatctgaccctgcaactctgccagactctgattcagcgcttcccgctggtttgcgtgaaaaaaactcataccctgtctacctcgtcacccatcgttatcgatatcgcggtttagtttctccgcatttaccattctaagcgtccatacgtttagacgtctagatagaaaatgaccgatcttatcgctggagtcaacgcttatattagtttagcccgatgattaatcttcactcagtacacgcaggaaattcatgtgtataaaaacgggcaaacatgctcgaaatgagccgcggtagacaggggaaataacagaatattgatatgaataacaggccgctagccagatagaaactctgaatagcgacctgccagaagtacgattacaacagctgagacaaacggttcaaatcggactggatagcgccggcggttacgtctcgccccgctcccggcccgcgaatcactaatgggttatcacgataccaacgactttcaatggcaaacacattatcgcatggcaataacgaggccagcggatgttcaggacgaacggcttccacgccaacccgcgctttaccattggcatcaaaacgcgcgacgtaacgtaataccagccccatttcgttggccgcctccagacgctgaatcatttgctgatttaacgcttcgccattttcgaagaattgatcgacagaacctgtctcagtacccgcaggcaccagggactcgacccgcacttgattaggttcgatgtcgtaacccgcttcgcgagccagaatcaccagtttgcgcatgacatcctgtccggaaagatcgacgcgcggatcgggttcggttaatccttgctgccacgcctgatccaccagctcggtgaaaggtactgtgccgtcaaactgtaggaacaaccaggataaagtaccggagaaaatgccgctaattgccagaatgctgtcaccgctgtcgcgcagatcccgcaccgtatggttgaccggcaaaccggcacccacggtggcgttgtacaaccaatggcgacccgttttggcgaaagcatcgcgaatctgtcgataagtattgctgctggatgcgcccgccagcttattggcgctaatcacgtggaaaccatagctggcaaagtccagatattgctccgccagcgactgactggccgtgacatccaataccaccaaatcatcgaatggatgcgcacgcatccacaggaaaagtgattcttcatcctgctctttggcttcatcatcgtagaaagccaaggtgcggctggcgtccagcccgtcgtaactcagcaagctgcggcggctatcaaccacacctgccagtacaaattcgaatccgctgcgagccgaaatgtttttttgttcgcgggcaaagagctccagccagcgagcaccaatattacctttgccgaacagcatcagcccgatacgtttttccgcccggaacagagtctggtgtaggccttgaatcaaatgttgggtcggccccagacgcagtaccgcaacgatgctgataccgtcttcggcctgccagataaactcaaccggctgatctttaagctgttgatagaaacgatggctgtgcaacggattcttgcaaacgcctgcgcctactaatgccaccagtgccaagccttcccgtagcgataatttccccggcagcgtggcatcttccaacacccgcagggcgctattgacgacttcagaggtatagcaaagctgcaataggttacgatcgggatgaatccccgtcgctaacggtttgatttgtgagcgtttcagcagcaggtctatctctttttgcgccagcgagaaatcgtggtgacgggctatctgcaattcaatcaggcagacatcatcatgactggtcactatttttgcaccggtgcctgatgccagcacgcgttcgatgcgagtagagccttgctccggctggtagctacagcgcagctgcaaatcgatatcactgccagaaaccggctgcaaagtacgcgtatgcaataccggcgcagccagacgcgccagctcgctagcttcatccaaacgcagcaacggcaacaaacaggcatctttaactttgcgcggatcggcgctatatacgccagcgacgtcactccagatggttacccgctcggcggcggccaatgccccaacctgagttgccgaatagtcactgccattacgaccaagcagtacggtttcacctgcatcgttacgcgagataaaaccggtgaccactaaacgttgatgaggatgttgcgccaatagctgttgcagcagcggataagatcgcccttcgtcgatctgtggctgtgctgcccgctctgcccgcaggaagctgcgcgcatccagccaggtggcatccatatcctgcttttgcagtaccgccgccatcaggcgcgctgaccagatttctccatggccaaccacttcggcataaatagcatcgtcaacgcggttatccaataatccagccagacgctccagatcctgaataaaggctgcaatcaacggctcggcggcctccggtggcaataatccattaatcaaatcctgctgatagcggcgcagcgcttgctgcacctgatgcgcagacaaacgatcgctttggcttagttttagccagtttatcaattggttggtcgtactgcctgcggcagataccaccattaaatcacccggtttactgtagttggccataatttcggccactcgcaggtaacacttcacgtcagcaaggctgctaccaccaaatttatgcagttgacgcccagtgaccgcccctgctatcgctattgcattcatgcttacctcgttaccgccaaccggaaggcattttccagatcggcaatcaaatcttcgctgtcttcaatacccacggaaatgcgtaacaagctgtcggtgatacccgcagcagtccttgcttccgccgccatacccgcgtgagtcatggtagcggcatgggaaatcaggctttccacgccgcctaatgactctgccaatgtgaataattccaaagcagaaaggaagcggcgcagcacctgttcatctccatccagttcaaaactgagcatcgcaccgaagccagactgttggcgacaggcaatttcgtggccgggatgttgtggcagagaaggatgatacagcttttttactaaaggctgctgttgtaaataaccaacaatgtcatccgcgttgcgctgctgttgagccattcgcggtgaaagcgttcgcaggccacgtaataacaaatagctgtcgaaagccgcgccggtcacgccaatattattcgcccaccacgccagctctaccgccagcgctgggtctttggcaatcaccgcgccggcaaccacgtccgagtgaccgttgagatatttggtgcaggaatggatcaccaaatcggcacccagcgccagcggttgctgcaataccgggctgaggaaggtattatccaccacggtcagcgcgcccacggcctgcgccgcctggcagatggctgcaatatctaccacccgcaataatgggttgcttggggtctcaatcagtaccagcttgggtttttccgccagcgcacgttttaacgccgcttcatccccttgatcgacaaacagcacccgataggcaccgcgcttactcagactatcaaacagacgatagctaccgccgtagcagtcatggggcgcaaccagtaaatcacccggctgcaatagcgtagtgcaaaccaaatgaatcgcagacataccggagctggtcattaccgctcccgcaccgccttccagctcagccagagcacgttgtaccacgtcgcgcgtcgggttgccgcgtcgggaataatcgtgcgttctgggctgattaaaatcgataaagttataggtactggagaggtgaatcggcggaacaacacagccatattgctcgtcatcattcaacccgctacggactgctattgttgcctgtttacgtgtcatattggtttctgcctgccgggacgctaaaaatgttacgtcagattagacgcacaaagaatggacgtcaatacatctggacatctaaacttctttgcgtatagattgagcaatggaataatacccgctaaaattatagcggctttaagtatcattatgatgtcacgctgatttcagctatgccccgtgcaacaatcagggtattaagcaacaggttgagtctattaatcacgggcaaattgcgtcctttcagtgactctggtcgagtaaaaccgacatttatttagtgagaacacggaagatcgggcataattggccggttttcagaattttgtatttttccgacaaatttaaggtgtcccatggctgagtggaacggcgagtatgtcagcccttacgctgaacacggcaagaagagcgaacaagtcaaaaaaattacggtatccattcctctgaaggtattaaaaatcctcaccgatgagcggacccgacgccaggtgaataacctgcgccatgcgaccaacagtgaattactgtgcgaagcatttctgcatgcctttaccgggcagccgttgccgaatgatgaagatctgcgtaaagaacgcagtgatgaaattcctgaagcagcgaagattattatgcgtgagctgggtgttgatcccgacacttgggaatattgatttcgcagtaatacccaaaacagcgggtaacatgctatcgagacaatctatcgacctatcgactcgacgaagtcgccttctgtccacagtaggcggctttatcctacgtcaggacatgatttatatggaatgactgattggcagacctgaatcctgcgatatacacagtatttaggcagattgatgatgattgagaagcagaaatgaaaaaaggcgctaaaagcgcctttttcgtctgacgggcagagattacttcttggcacccggcacgctgaaacgcttgttgaagcggtcaacacggccaccggtagcaacgtcacgctgcttgccagtgtagaacggatggcattcaccacacacgtccagattcaggtcatgaccaacagtagagttgatcttgattacgttaccgcaagaacaagatgcagtaaccaattcgtatttagggtggatacctttttgcatgggaaacctctaatttaggccgtgtcgctatccagccctgttccgccagacaccacacgtagttaataataggatttgatatcggattatatcaaaggcggcgaatcatacagaatttgagcagccctcgcaatcgaatccgcacattgtgaatcacacagtgtaaactgttcaatctttttttatccaggatggtgtcatgtccgttgttcaagttgcattgccggtaccgcttgcacgctcattcgactaccgcttaggcagtaatatgagcagcccggcgatcggcgggcgcgttagcgtcaccttcggcaaacgcaaagctatcggaatcgtggtgggtcttagcgaaaccagcgatttccctcttgagcagctcaaacctattgaagaagttctggatcaggaaagtttattcccaccaagcctgtggcgtattttgcgctgggctgcggattattatcactatcccattggagaagtgctgtttcacgccctgccaatattgctacgacaggggaaaccggctcaatccgcaccgctttggcaatggtttgcaaccgaacaaggccgggctacgccgccggaaagcctgaagcgcgcccctaagcaacagcaggctctggccgcgctactacaaaaacctgtttatcgtcatcaggttaatgaactcgccctgacagaaagcgccttgcaggcgttacgctccaaaggattaatcgacctccgggcgcaggaaccggcaaccaccgactggcgtactcatttcgaagtgctgggcgaccggctgcgcctcaataccgagcaggccaccgccgtgggtgcgattcgcagcgaagatactcagtttgccgcctggctgctggctggcgtcaccggttcaggtaaaaccgaagtttacctgagcgtactggaaaatattctggcgcaagggcgtcaagcattgattctggtgccagagattggcctgacgccgcaaaccatcgccagattccgcgaacgctttaatgcaccggtggaagtcctgcattccggcttgaacgatagcgaacgtttatcggtttggctgcgggcgcgtaacggcgaagcggccatcgttatcggcacgcgttctgcgctgtttacgccgttttctcgccttggcgtcattattatcgatgaagagcacgacagttcctataagcaacaggacggctggcgctatcatgcgcgggatttagccgtgtttcgcgctcgcgaagaaaatattcccattgtgatggggtctgccacgcccgcgctagaaaccctgcataacgtgcaactgggtaagtatcgtcagttaaccctgactaagcgtgccgggaatgccaaaccggcggcgcagcatttactggatttaaagggtctgccgctcaaagtgggcctatcccagccgttattacagcgcatgaaagatcatcttaaagctgataatcaggtaattctgtttcttaaccgccgcggttatgctccagcgttgctgtgccacgaatgcggttggatcgccgaatgccagcgttgcgatcactattacactttgcatcagaatcagcgccagctgcggtgtcaccattgtgacagccagcgtccggtgcctcatcagtgccctcactgcggctctacccatatggtttccgttggcgtaggaaccgaacagttggaaaatgagttggcaccgctgttcccagatgtaccgatcacccgaatcgaccgcgataccactagccgtaaaggctcattggaacaggctttggccgaggtacatcagggtggcgcgcgcattctgatcggtacgcaaatgctggctaagggtcaccattttcccgatgtcacactggtggcattacttgatgtggacggcgcgctgttctccgccgatttccgctcagccgaacgttttgctcaactgtatacgcaggtttctggccgagccggacgagcaggcaaaaaaggcgaagtgatcctgcaaacccatcatccggagcaccccttgctgcaaaccctgctgcaacgcggctacgatgattttgccaaacaggctctggcagagcgccaaagcgtttttctgccgccttacaccagccatattattgtacgcagcgaagatcacgataatcgacagtcagcgctattcctgcaacagctacgcaatctgctggaagccagtccgatgaaagatgatgctctgtggatcatggggccagtaccggcgctacaggccaaacgcggtgggcgtttccgctggcaactcctgctccagcatccatcccgtcagtttctacaaaaattgataaaaagcagccaaccgctaatcaacactttgcctcaggcaaggaaagttaagtggactttagacgtcgatcccatagacagttagtctttagcttgttaattaatagatacaggtagggttacaaggcaaacgtttacggtgtgatctgcgaggcatatcgaaaaaaactacttatgtcacatttttcatgcaaattaggtaacaaattgacctcactatctgtatagaatgacgtaaggcattaattttaccgagaccactcggcttggaacgaacatcacctcgccgatcgggaatcccattcgcgtgcgataaaacattaatattccgtgctattggtaacaaactatctcaaagcgttggtgctggctcggagccagagcaaggagaaaggcgttggaacataagaaagaattcagtatggcgaccatgaaagacgttgctgaaatggccggtgtttcaaccgcgacggtttctcgggcattaatgaatccggaaaaagtctcgaccatgacgcgacaaaaagtagagcaagccgtcctcgccgtgggttattccccccatgccttatcccgaaatatcaaacgcaacgagtcgcgtactattctggtcattgtgccggacatcagcgatcccttttttgccgacattgttcagggtattgagcaaaccgccgcccaacaaggctatttggtgttaattggcgactgcgcgcagcaaacccagcaggaacgcactttcgtcaatttgattattaccaaacagattgatgggatgctgttactcggttccaacctgccgtttgatgccagtaaagaagaacaacgcaaccttccaccgatggtgatggctaacgaattcgcgccagagctggagctgccgacggttcatatcgataacttaaccgccgcttttgaagccgtacattatctgcatcagttgggtcatacgcgcattgccaccatcgccgggccagagacaatgccgctgagccattatcgcttacagggttacgtacaagcgctgcgccgtaatgggattgccattgagcaaacttatattttgcggggcaatttcagctatgaagccggtgcagaagcctttgccgaactgatgtcactgccgaaaccgccaacggcgattttctgccacaacgacgtcatggcgatcggcgctatctggcaagcgaagaagatggggattcgtattcccgaagatgtatcactggttggttttgacgatctcaaactgtcgcaatactgcgatccgccattgaccacggtagcgcaacctcgctaccaaattggtcagcaagccatgttactattactggaacagctacaagggaataacgttcaaagcggttctcgactgttagatagcgaattaatcattcgaaacagtacctgtaagcctaaaagctaggcaaatattatagggttaagtaacatgactgacttactccaacatcaaaacgcagcgaaacgatagtggcacaaagagattatgtaagccgagggcgctcaggagcgcggcgcaagagcaccagcaagaagaaaagcagtgctccaagaatatcgaaaaccctggtggcgctagccggcgccttgttggtggtattcgttggtggcctctatttcattactcataacaaaccgggtgaactcccgctgttacccagccatgatccgcgcacgggcaatggattaccgcctaagccggaagaacgctggcggtatatcaaagaactagaaaatcgtcagattggtgtaacgacgccaaccgaaccttctgctggcggcggcatcgatgcaaaaacccagttaaccaacgaacagcgccaattattagaacaaatgcaggccgatatgcggcaacaaccgacacaactgtcggaagtgccttataacgatgccactcaggttcctcgttctcaggtaacaatcaagccgccagtgaatgttcagccacagattcagcaaccggttagccaaccgcgccaaaccgcgccggtaacagcgccatcagcgcagcagcggatgttgccgtctaatccggctccggttactccggcggtaacgccaccgaagccggaaaaagagaaggaaaaagaaaaaacccagcgctggatgttgcagtgtggttccttcaaagcaatggatcaggccgaatcagtgcgcgcgcagctggcatttgaaggtattgagagccggattactaccggtggcggttggaatcgcgtggttctggggccttatagcacccgccctgcggcagataaaatgcagcaacgattgaaaggcgcaggtgtatccagctgtattcccctctctattgggggttgaaaagtatcaatccccccccatttataatctcaatatgcctcgcgttgtgttgaacgatacaacgcgggggctcattccgtctgcaacgagggttcgctcgtgacaacaattgtaagtgtacgccgaaatggccatgtagtaattggtggtgatggtcaggtcactctgggcaataccgtgatgaaagggaacgctaaaaaagttcgccgcctatataacaataaggtcattgccggttttgcaggtggcaccgctgacgctttcactttatttgaactctttgagcgcaaactggaaatgcatcagggtcatttgaccaaggccgccgttgagttagccaaagactggcgaaccgaccgcatgctgcgcaaactcgaagcgctgctggcagtcgcggatgaaaccgcttcgcttatcatcaccggtaacggtgacgtcgtgcagccagaagatgatttgatcgctatcggctccggtgggccatacgctcaatccgccgcgcgcgcgctgctggaaaacacagaattaggtgctcgggatatcgttgagaaatcactgagtattgcgggggatatttgtatctataccaaccgcttccaaactattgaagaattaacttacaaggcgtaaggatagaatatatgtctgagatgaccccacgcgaaatcgtcagtgagcttgatagctacatcattggccaggacaaagctaagcgcgcagtggcgatcgccctgcgtaaccgctggcgtcgtatgcagcttaacgaagagctgcgccatgaagtgaccccgaaaaacattctgatgatcggcccaaccggcgtcggtaaaaccgaaattgcccgccgtcttgcaaaactggcgaacgcgccgtttatcaaagttgaagccactaaattcaccgaagttggctatgttggtaaagaagtggactctattatccgcgatctgaccgacgccgccgtgaaaatggtccgtcatcagtccattgaaaaaaaccgttaccgcgctgaagaactggcggaagaacgtattctggatgtgctgattccaccggctaaaaacaactggggccaggttgacgaatctcaggagccttccgctacccgtcaggcattccgcaaaaaactgcgtgaaggccagttggacgataaagaaatcgaaatcgatctggctgccgcaccgatgggcgttgaaatcatggcacctcctggtatggaagaaatgaccaaccagttgcaatccatgttccagaacattgctggtcagaaacaaaaaccgcgtaaaatcaaaatcaaagaagcattcaagctgttgattgaagaagaagcggccaaactggttaatccggaagagctgaaacagcaggctatcgatgccgttgaacagcacggtatcgtgttcgtggacgagatcgataaaatctgtaagcgcggcgaaacctccggcccggatgtctcccgcgaaggtgtgcagcgcgacctgttgccgctggttgaaggctgtaccgtttcgaccaagcacggcatggtgaaaaccgatcacattctgttcatcgcttcaggcgctttccaggttgccagcccgtcggatttgattcctgagcttcagggtcgtctgccaatccgcgtagagctacaggcactgaccaccgaagattttgaacgcattctgaccgagcctagcgcttccttgaccgagcaatacaaagcgctgatggcaaccgaaggcgttaccatcgattttactgcagaaggtattcgtcgcatcgcagaagccgcatggcaggttaatgagcgtaccgaaaatatcggtgcccgccgtctgcataccgttctggaacgtttgatggaagatatttccttcgatgccagcgaaagtaacggttcatccgtgactattgatgctgaatacgttgggaatcatctggatgagctcgtagcagatgaagatctgagtcgatttattctataatttggttctattagcgtccgctggatagataaaagtgggaggcttggcctcccctttttgtctctggctgacatggactcacacagaccgaagcgaattatgagctcatcaacttctaccagccaagctcaagcctggctagaaagcctgcggccacggactttaccactggcttttgcctctattgttaccggctccgccctggcttattggctcgacagttttaaacctgcggtagcgctactggccttgattactgccggtatgctgcaaattttatctaatctggccaatgactacggcgacgcggtgaaaggtagtgataccgaagaacgcatcgggccactgcgcggaatgcaaaaaggcatcataacccgcgagcagatgaagaaagcgctgattctcaccgttattctcaccattatttccggcgtagcgctgattgccgttgcctgtgaaaaaccgagcgatattctgggctttctggtactcggcttgatggcgattgtcgccgccatcacctacaccattggtagtaaaccttacggttatatgggtttgggggacatttcggtactaatgttcttcggctggctaagcgtggccggtacctattatctgcaatcgggccattttgacagtctggtgatgctaccggctaccgcctgcggtttattggccactgcggtgttaaacattaataatctgcgcgatatcgaaagcgatgcggccaacggcaaaaataccctcgccgtgcgtttgggcccacagcgcgcccgttattatcacgccgtattaatcaccgccgcgattgcctgtctggcgttgtttagcctgctttatctgcaccgctggaccggctggatctttgttctggctattccgctactggtaaaacacgcgatttatgtactgcgcgagccaaccgccgcaggcatgcgtccgatgctggaacatatggtaaaagctgcgctgctcaccaatatcctgtttgccgttggtctggtatttaactaacgcgcctttttctgccaattcccagaaaaccctgcggattggcagaatttaacaattgatgattttgccaacagtagccagaaagggatatactgactatcccagccgcaaccagacattaatcctatgaaatatgatacttccgaactctgtgacatctatcatgaagagataaatgtggtagaacctctgttctccaattttggcggacgtacttcatttggtggccaaatcacgaccgtaaaatgcttcgaagacaacgggttactctttgacctacttgaggagaacgggcgtggacgcgtgctggtcgttgacggaggtggttcagtgcgccgagcgctggtcaacgcagaattggctagcttggcggccgcgaatgaatgggaaggcattgtggtttacggtgccgtccgtcaggtagacgatctggccgaactggacattggcattcaggctatggctgctattccggtaggtgctgctagcgaaggcatcggcgaaagcgatattcgcgtgaacttcggcggcgtaactttcttctccggcgatcatctgtatgctgataatacagggattattctgtcggaagatccgctggatatcgaataacaccgactcggttataccaaacgaattctataagaaagggcgatataaatatcgcccttttgcttttgcgcttaatcggttgccagcgctatggatgccgagaataacctcagacctcttccattttacccagcagtgcgcgcagacgatcctgccatacgtgctgttcttgctttagctgctcattttcacgcactaacgcttcacggttacccgctgcgtcctgaacctcttgggacagggtgttgtttttttctttcagctcttcaatttccatctgcaacaaagtgatggtatcaatcgcctgctgaactttaccttccagtttctcaaatacttcaaatgacattctttagtcccctcatgatcgcaaggcgtacatctattggtagcggtcgcattttgaagatgcaaccactgcgaatatccatcgcgctatatattcatcgaactcggtaacaagcgctgtattttaacgcgcccccgtaaacagcggcgcagcttgattaaaacgattgtatgtagcctgtctccccctgtctagcgacataccggcacaaagcacagtctctcgcaatttacctagcgccactatcagcaaatgctgaaaacctgcggcctgttatcgcgtcatattttacatatttacaacaatggaaagtaaaagcactggtctgatcacactttcagaaagcactaacacccacgcgttacgcgaattcgctcatttttatgacaaggcacacagatttcgatttcgctatttctcgtttgtgctcgttaacgataaattcacataaaccccaaggatgaatttggggaaaaaacaataaataccctataactctctgtctgtaggacatcactatgagccaaacatcaagtccgaccctaaaaggccagtgcattgcggaatttcttggcaccgctttgctgatattttttggcgttggctgtgttgccgcattaaaattagccggtgcaagtttcggccaatgggaaatcagtattatctggggtctaggcgtcgccatggccatttatctaacggcagccatttcaggggcgcaccttaaccccgccgtcactatcgctctgtggctgtttgcctgttttgatcgcaaaaaagtccttccttatattgtggctcaggttgttggcgcattctgcggcgcggctctggtctacggcctgtactacggcctgtttgttgatttcgaacaaacccaccaagtggtacgcggcggtagcgaaagcctgaatctggcaggaattttctctacttacccaaatgcccacatcaccgttttccaagctttcctggttgaaaccgtgattaccgccattctgatgtgcctgattctggcgttgaccgacgacggtaacggcattccacgcggcccgctggctcccctgctgattggtatcctgattgcggttattggtgcttcgatggggccattgactggctttgcgttgaacccggctcgtgatttcggccctaaggtatttgcttatctggctggctggggcgatatcgccttcacgggcgggcgtgatattccttacttcctggtaccgattttcggacctatagtaggcgcattattaggtgcattcggctaccgcgcactgattggccgccatttgccatgtgacgtctgcgttgtggaagaagatgcttccaccagcaccaccgaacgtaaagcgtaatccagacactggaataaacggtaactaaagcaggcttattattatgacaacagaaaataatactgaaaaaaaatacatcgttgctctcgaccaaggcaccaccagctcccgcgccgttgtgctggatcatgacgccaacatcgtgagcgtttcccaacgggaatttacccaaatttatccaaaagccggctgggttgaacacgacccaatggaaatctgggctacgcaaagctcaactctggtagaagtgctggcaaaagccgatattcgctccgatcaaatcgccggtatcggtatcaccaaccagcgtgaaaccaccatcgtatgggaaaaagaaaccggtaagccaatttataacgccattgtctggcagtgtcgtcgcaccgcagaaatctgcgaaaaactgaaaaaagacgggctggaagagtatatccgccacaataccggcctggtggttgatccctatttctccggcactaaggtgaaatggattctggatcacgtggaaggcgctcgtgaacgcgccaaacgcggcgaactattattcggtaccgtggacacatggttagtgtggaagatgacccaaggacgggtacacgtcacggatttcaccaacgcatctcgtaccatgatgttcaacattcatcagttggattgggatgagcgcatgctggaagtgctggatattccgcgcgccatgctgccaaaagtgcgttcttcttctgagatttatgggcaaaccaacatcggtggtaaaggcggtactcgtattccaatcgccggtatcgcgggtgatcagcaggccgcgctgtatggccagctgtgcgttcaacctggtatggcgaagaatacctatggtaccggctgcttcttgctgatgaacaccggcaaagaggcggtacgctccaatcacggcctgttaaccactatcgcctgcggcccacgcggcgaagtgaactatgcgttagaaggggcggtgtttatcggcggggcttccattcaatggctgcgtgacgaattgaaactgatcagcgatgccgccgattccgaatacttcgccaccaaagtgaaagacagcaacggcgtttacgtcgtgccagccttcactggactgggcgcgccttactgggatccgtatgcccgtggcgcaatcttcggtctgactcgcggcgcgaacagcaaccacattattcgcgcaacgctggaatccatcgcttatcaaactcgcgacgtgctggatgcgatgcaggccgatgccaatacacgcctacaatccctgcgcgtagacggcggtgcggtagccaataacttcctgatgcagttccaggcagatattctgggcactcgcgttgaacgtcctgccgtacgtgaaagcaccgcattgggtgccgctttcctcgctggtttagccatcggtttctggaacgatctggacgaagttaagagcaaagcaaccattgagcgggaattccgcccaagcatcgaaacgacggaacgtaactaccgttacagcggttggaaaaaagccgtggcccgtgctcaagcctgggaagaacacgactaatattgtcaactttcgcatcgcagcagccagagctgtaatttgaaagagtacatgcatgacccatcacgcgctgtcgctccccccggcagcgcgttttttatcccttcgcccctgccgccacgccccagtgtgatagaattcccgctctatatccgttttcccattctgcaattaacaggtcgagccatgaaacgtgaattagccatcgaattctcccgcgtaaccgaagccgccgccttggcgggctacaaatggttaggtcggggtgacaaaaatgccgccgacggcgctgccgtacgagctatgcgcattatgctcaacaaggtcaatatcgatggccggatcgtgatcggcgaaggggaaattgatgaagccccgatgctgtttatcggcgaaaatgtcgggactggcgaaggagatacggtagatatcgccgttgaccctattgaaggcacccgcatgaccgcaatgggccaatctaacgctctggctgttttggcggttggtgataagggcaccttcctacatgcgcctgatatgtatatggaaaaactggtggtcggcccgggagccaaaggcgcaattgatctcaatttaccgttggctgataacctgaaaaatatcgcccataaactcaataaaccgttatcagaactgacggttattacgctggctaagccacgccacgacggtgtgattgcccaaatgcagcaaatgggcgtcaaagtgtttgccattcctgacggtgacgtcgcggcctctatcctaacctgtatgccggaaagcgaagtggatgtgatgtactgcgtcggcggcgcgccggaaggggttatttccgcagcggtcattcgcgcactggacggcgatatgcaagggcgtttgttgccgcgtcatgaagtcaaaggggacaacgaagaaaaccgtcgtttaggagagcaagagctggagcgctgtctgagcatgcgcatcgaggcgggtaaagtactgcgtctggacgatattgctcgtaacgataacgtgatcttctcagcgaccggtattaccaaaggggatttgctggaaggtatttatcgtaaagggaatatggccaccacggaaaccctgttgattcgcggtaaatcccgcaccatacgccgcattcgctctactcacttcctcgatcgtaaagacgaagccttgcacgaatatctgctgtaattcatccgactaagcaaaaaaatgataagggcaccgaatcacaagtgcccttaacgtcactaaaccatatgttcctggcgctgcatccgatgagatagcggccaccagcacagcaaaatcaacaacgccatagcaaacatcagcaacccaagactaaactgcccggtctgcggtaacatcgccgatagccaggttgtcaggccggagccgatattctgcaagcctcccaccaaagcacctgcggcacccgccaggtatgggaaaggttccatcgccccggtcgttgccagcgggaataacatacccgcgccaaagaagaacaaagcggcaggaatgatcagcgtccagatattcatgatgccaaaccaaccgggaatccacatcatcagccccgccagcaggcagctaatcactgagtgccacattaaattatggaaagttcgcccttcccgccccgcataccaagccccgaaaaatgccgccggtattggcaggataaatagaatactgaccgtcaggccgctgagacccaatacgccgcccattaatacgccggagctggcttcaaacaccgcaatcccagccagagcgccaatcagcatcaccagataacagctaaaagaacgatcagataacaaggtatagaaactggccagcatgcgcggtttctccgctcgttcagggcgcgtttctggcagccagcggaacatgcaaaaagccacgccgctgcacaataagagtaaaaaagcgtagcaggcgcgccagccaaaccagcttgccaacacgccaccaataatgggtgccaatagcgggctgaccaaaatccccatattcaacatactgttggcataacgtagcgaagtaccggcgtataaatcacgcggcatggtacgcgccatcacacctgcgacaccggtgcccatgccttgcaaagcgctggccgccaccaacatcggtaaattattagagaacaaagcgcctaacgcaccgagcataaatatcgtcatccccgccagaataactggacggcgaccaatgcggtcagataaaggcccgtaaatcaactgcgaagcaccataggtcaacagatatgcagccataacccgctgtacggctccggggcgtacggcaagatcctgagcgatttcagcaatcaccgggacataaatggtctgggccatctggccgacagcaaccagaatgattaacatcagcagcaggtgaaaattctctatttttctcatggtcttaagtaatatctcaatgcagattacatgctttttcctgcgaaaatttcgggcaaatcgcagtacacctttagttatggcgcataagctatcaaattcataacttatatccagctagagtaagattttggcaaatagtactttggcagtaaaaacgaccgcaacgtaaattaatctgtacatcatcaactggattttaataaaaatacccacactttatgctgataacatttaatcgataatggtttcgagccaaatcccataaaatgcctccatcgctatttacatcatgagcacatctgaataacgggagttgtaagcatggctgaatgggtcagtggtaaaatcacgcacgttgaacattggacgaacgccttgttcagcattcaggttgacgcgccaatagatacctttactgccggtcagtacgccaaactggcactggatgtccacggtgaacgggtacagcgagcctattcctacgttaatgctcccagtgataacaagcttgaattctatttggtcaacgttccggaagggaaactcagccctcgcctacgtcagcttcgggtcaacgatgaaattatggtgaccaaacaagccgcaggtttcttcgttctggaagaaatccctgactgcaacaccctgtggatgttagcgacgggtaccgccattggcccttatctgtcgattttgcaggaaggtcgcgatttggaacgtttcaacaatctggtactggttcacgccgcacgctttgctcaggatctcagttacctgccgctaatgcagcaactggagcaacgctacaatggcaaactgagaattcaaaccgtggtcagtcgtgaagagtcccccggttctctgaccggacgcgtacctgcgctgattgaacatggcctgctggaagcggcggtaggtttgaagattgatagcgaacgcgatcacatcatgctgtgcggcaacccgcagatggtccgcgatacgcaacagacgttgaaagatcagcgtcaaatgaaaaaacacctgcgtcgcaaacccggccatatcaccagcgaacattactggtaactcgaatcagccgttaaatttggtcgaaaaaaagggcgctaagcgccctttttcatctaaatagcccgttattgttttttctcaggcaaaaacttcaccggatctggttccgggccaaaacgattatcgccttcgtgacccagaaatgcgccgcaatcaatcagcatcatgacaataatcagcgtgggaatgaaacgcccaacgccccactgccagatcggcgccaacatttgccagtttccagccatcagcatccaggccagcaccaccaacagcgcccaccaaccgactttattgcgatcgtgcaggcgttttaccacaactgccgccgttggccacagcagaaaaacaatcgcaaaggcggcggtttgcatcggcaatatctcttgcccggcaagcgtaaaaatagtcgccatggccagtagccacaggccgatccaaatccaaaaatcacgacggccaatccggcctttaaacgaaaaacaccattgctgaatggtcatagagattcgattccatttcttcgaaattattgcgccaaagtgtaccctaacgccgagcttaacgaataatctttgcgaggatttttgacaacggctaccgaataccgttttaatcttccacacactcccttaactacggcgtaagtcatgagaaataccatagccgctgtgctcgccattttagtgctaatggccacggttagccgcacagctcatgctgacccaacggataatagcggcgctccggtgccgaacaaccaacccactgcgccctatctgctatcaggggcaccgacttttgatttaaccctggtaaaatttcgcgaaagctacaaccaggccaatccatcattacctattaatgaatttcgggccattagcgctaaagatgagggcagcaatctgacccgtgctgccagcaagattaatgaaaatctttatgcctcaacggcgctggaaaaaggcaccggtaaaataaaaactctgcaaattacttatttaccgattaaaggtgatgaagagaaagctgcaaggctggtcgctatcagctatatggcagcgttgatgcgtcagtttgaacccaccttatcgctacagcaaagtctggataacgtactcaaactgctagcgcagggaaaaggctcccatttccatagccatgctgtcggtgcgatccgctatgtagtggcagataacggcgaaaaagggctaactttcgctattgaaccgattaagctggcactatccgagccataatctcggcgtaattaatgacaaaaagcaaagccattgccattaatcatctctatactgttgggcaggtaaactgccggtccggcagtcattattattgaccctcgcgtccctggttggaggaagaaacatgcgtcatccattagttatgggtaactggaaactgaacggtagtactcacatggttaacgagctgatcgctggcctgcgtaaagaactgagcaatgttgacggctgtggcgttgccattgctccaccagcaatctatctgagccaggctaaacaccatctttccggtagccgtattgctctgggcgctcagaacgtcgatgttaatctttccggcgcatttaccggcgaaacttcagcagaaatgctgaaagatatcggtgctaaatacatcattatcggtcactccgagcgtcgtacttatcaccacgaaagtgatgagttcatcgccaaaaaattcggcgtactgaaagacgctggcctgatcccagtactgtgcatcggtgaatctgacgcagagaacgaagcgggtcaaactgaagccgtttgcgctaagcaactggacgcagtgctgaacactttgggtgcaaaagcattcgaaggcgcggttatcgcttacgaaccaatctgggccatcggtaccggcaaatcagccaccccagcgcaggcgcaggctgttcacaaattcattcgtgaccatatcgccaaacaagatgctgcagtagctgaacaagttattattcagtacggcggttctgttaacgataaaaacgctgcagaactgttcgctcagccggacatcgacggcgcattggttggcggcgcatctctgaaagctgacgctttcgcagttatcgttaaagccgcagctaaagcgaaaaaagcataattcacgtttaaatacgtaaaaatgcaaaaaccccggtaacggggtttttttatgtctgaatctcaatgccgtttagcgcttattgatctcgtcaaatacgccgccggtagcaaaatgcacctgttgggctttggtccacccgccgaaaacctcatctatggtaaataatttcaatgttgggaattcgctggaaaatttggccgctactgtcgcatcacgcggacgatagaagtttttcgccgcaatggtctggccttctggcgaatacagatacttcaggtaagcatcggcgacttcacgggttccacgtttatcgacgactttgtccactaccgaaaccgtcggctcagccagaatggaaacgctcggcgtcacaatatcaaactggtctttgcccaattcattcaccgccaatagggcttcattctcccaggcaatcaatacgtcgccaataccgcgctcaacgaaggtatttgtcgcgccacgcgcaccggagtccagcacttcaacatttttatacagcgttttgacgaattcctgcgccttcgcctgatcgttattgttgtgctccagagcgtagccccaggccgccagatagttccagcgagcgccaccggaagttttcggattcggcgtaatcacggaaatccccggttttaccaaatctgaccaatcgtgaatttgcttgggattacctttacgcaccagaaaaacgatggttgaagtataaggagcagaattatccggcaggcgcttaatccagttcttatcaatccgaccacgttcagcgattgcgtccacatcgtaggccaaagctagcgtcacgacatcggcttcaataccattgataactgaggttgcctgcttaccagagccgccgtgcgactgacgtaccgtgactttatccccagtttgctgctgccagtgtttactgaaagcctgattatattcctgatagaattcccgcgttgggtcgtaagaaacattcaacaactgaatatcttttgccacggcacctgatgccaccagcattaatgttaaacctacaccccatttgcgcatcgcccgctccccagaatttatataatcaaccccaataggttggataagataaagcctgccagaaactaagctaacgattaaagaataaaaaataccctattatatctttaagaaatatacgttccgtaaaatgcaaaaaacccccgcgagcggaggcttttttcagacctggaacgtggattagaacagttttttcgctgtgtcgtaccagtcttctttgaatttgcttttcttgttcttcggatcgatacacacagaaatcaggtcgttaaccattttctcattctgtacgccgacgcaaagaccgcctttgctctgatcaacatttttcatcagcagttcaaccgcataagcacccatacgggaagccagaattcggtcataagctaccggtgaaccaccgcgctgaatgtggcccagtacggttgcacgggtttcacggccagtttctttctcgatatatttagccaactcatcgatatcacagagtttttcggtgatagccacgatggcatgttttttacctttggcgataccggctttgatctcacaaaccagatcgtccggattgaaaggcacttccggaatcgcgataaactcacaaccaccggcgatagctgcagccagagtcaaatcgccacagtagcgtcccatcacttcaacgatagaaatacgttgatgagaagaagaggtgtcacgtaaacggtcaatggcctcaaccacagtatccaacgcagtgaagaaaccgatggtgtagtcagtacccgccacatcgttatcaatggtgcccggcaggccaacgcaggaaataccgccttccgcctgcagtaaatcagcaccggcataagaaccatcgccgccgataacaaccaatccatcgataccgcgcgctttcatgttctcaatggcttttgcacgaatggccggatcgcggaactcagggaaacgcgcagaacccaggaaagtaccgccccggttgatcatgtctgaaacgctgtagcgatccagctgttccatgcgatcttcatacaagccgaggtaaccatcataaataccgaaaacttccagcccttcagacaaagcagcgcgaaccaccccacgaattgccgcgttcatacctggcgcgtcaccgccgcttgttagcacaccgattttctttaccatgactacctctgaacttgtagatgcgattttttgagaattctttattagccgattatgccatgagcacgatactagtacataaaatcaacgctacgaccatgatattggatattatagcaaaaacactatgctgaattgattcaagtcacacgaagtaacggtaaatatttccatcattctgtaacacagtttcaagaatcaacgcaaaattacagctcccaatgagcatggcgctcttttggcactaccgagcaaggatcttgatggataagcacatcagcacccggaaaacggtgtaacaacgcgcgttcaacctgttcagctaaaatatgcgcctgcatcaacggtagatcgtcttccatctccagatgcagctggataaaacgagtcggcccggattgccgcgtacgtagatcatgagcgccaatcactcccggccaggaagtcacagtatcaataatggcctgccgttcttcatcaggtaaggccctatcaagcaatgactgtaccgcttcatagcccatacgcagggcgctatataaaatataaacgcctatacccagcgcaaataacgcatcggcgcggtgaaaaccgtaccaacttaaagccaatgctataagaatagcaccattcatcatcacgtctgattgataatgtagcatgtcggcccgtatcgcctggctttgggttttacgcaccacccagcgctgaaatgtgactaaaatcagggtactgaataacgcgactaaagtaacgccgacgcctataccgggatcttgtaagggttccggcgaggcgagatgctggaagccggttaaaaacaggaataaagcggagccagaaataaacatactttgagccaaagcggccaaagactcggctttgccatgaccaaaggtatgctcttcgtccgctggttgcagggagtaacgcaccacaaacagattagtgagagaggcagccagatccaccagtgaatcgaccaaagccgccaatacgctgacagaaccggtcgcccaccaggcaaatattttaattaacagtagaattgatgctagtgcagtagccgataaggccgcagctttaaccagccgcgcatattgcagatccataacttgtcccaaattgaatcttagggggcaagtataacggataccggcaaaaaaaagccctccatcatggagggctaaaagacagggatggtgtctatggcaaggaaaacagggtattactgggtagtaccttacggtactggatagtactttacttctgggcagaagccggttgtgctgctggagcctgctgcactgtagccatccgctgtttatgcatctggtttaaggcagttttttgctctggcgtcagcaggttgtacatttggttgcgtactttggccatttcgacctgacgctcaacctgttgtttagacattttttcagcctgcgctcgaactgcggcttcatcaaatttatctgcggtaatcagactatgcattgcttcccgatcagcgacaggcattgccgttttagttccgcgatgctggcgcatcagatcgcgcatctgctgacgctgttgctcagtcaggttcaagccttcaaacatgttatggtggccgcgaccacctttcatcattttgccgtcgaagtcgtgacaccagttgccagcggttgcaacagtatcagcggcaaatgcggcggtagagccgaaggccaacattgacgctataactaacgttgttactttacgcatgattaactcctggattcactctgctatgcaattcaatgttaagcagtgtataggtctggctgaaaactagcgtcagtgcatgtaaaactgaggtcaggggatgtaaatctaggtaaagtcatagaatcgcggcaattgttaacgtattttgcgtctagaggtgaaataactatgcataaaattctacttgttgatgacgatcgcgaactaacttcgctattgaaagaattacttgaaatggaaggcttcaacgttgttgttgcctatgacggcgagcaagcgctaaacctgctggacagttcgatcgacctgcttttgctggacattatgatgccgcgtaaaaacggtatcgaaaccttaaaagagctacgtcaacatcaccaaacgccggtgattatgctgaccgcgcgcggcagtgaattggaccgggttctgggtctggagttaggcgcagatgactatttggccaaaccgtttaacgatcgtgaattggtagcacgcatacgcgctattttgcgtcgttccaattggagcgaacagcagcagaatgtagatcaaggcgcaccaacgctagaagttgactgcctgcaactgaatccgggtcgtcaggaagccagctttgaaggtcaggtactagatttaaccggcacagaatttaccttgctgtatttactcgctcagcatctgggccaagtggtttcgcgtgaacttctcagccaggaagtcttgggcaaacgactgacgccatttgatcgcgccattgatatgcatatttccaacctgcgtcgtaagttaccggaacgtcaggatggtttaccttggttcaagaccttgcgtggccgcggatatttgatggtatctgaaacatgatcaacagtttgacggcgcgaatcttcgctattttctggtttactctagcgctagtgctcatgctagtgctgatggtgcctaagctggattcgcggcagttaacgccgttattagaaaatgagcagcggcagggcgtcatgctggaacagcatattgaagttgaactggccaacgatcctgccaatgatttgatgtggtggcggcggctgtatcgcgccattgagaaatgggccccccccggccagcatctggtgttagtgaccagcgaaggccgggtgattggcgctgaacgtcatgaaatgcagattgtacgtaactttattggccaatcggataatgccgatcagccgaaaaagaaaaagtatggtcgatcagaaatggtcgggccattttctattcgtgatggtgatgacaactaccaactctatttaattcgaccagcaagtagcccacagtccgactttatcaacctgatgtttgatcggccgttactgttactgattgccaccatgttgatcagtgcgcctctgcttctctggctggcatggagcctggctaaaccggctcgtaaactgaaaaatgccgccgatgacgtggctcgcggaaatctgaaacagcatcctgaactggaatccggcccgcaggaattcctagccacgggtgccagtttcaaccaaatgatcagtgcgttggaacgaatggttgccgcacaacagcggttgatttccgatatttcccatgagcttcgcaccccgctgactcgccttcagttggcgacagcgttgatgcgccgtcgccatggagagggaaaagagctggaacgcattgaaacagaagctcatcggttggacagtatgatcaatgatctgctagtgctttcccgtaaccagcataagaatgagctagcacgagagccgattaaagctaatgacctttggtctaacgtgctggaaaatgcgcaatttgaagccgaacaggtgggtaaaacgctggaaatctctgctccaccgggcccttggacgctatttggtaatccgtcggcgttggatagcgcgttggaaaatattgttcgtaatgctctgcggtattctcaccaccatatcgcagtagcgttccaagctgataatcaaggcgtaaccatcactgttgatgatgatggccctggcgtcagcgcagaagaccgcgaacagattttccgtccgttctaccgcactgacgaagcccgcgaccgcgaatccggcggtacaggcctaggtttagccattgttgaaaacgccgtaagccagcatcgtggctgggttagggcggaagatagcccgcttggcggcctgcgcttgattctctggcttcctctacacccattcaaagcctagtcatttggccgatcccacaggttcggccagatcgacacattttctcactggccaaatctgcccatatcaacggatgcccactgcaccaaatcggagtttctggtatcctgcgcccctctttactggggggcctatgctgaatattgttttatttgaaccggaaatcccaccgaacaccggcaatatcattcgtctgtgcgccaataccggctgccagcttcatttgatcaagcccttgggctttacctgggatgacaaaaggctgcgccgagcgggcctcgattatcatgagtttacgaatattaagcatcatcatgattatcaggcttttctcgacagcgaaaaacccgagcgcctgttcgcactgaccaccaaaggtacgccagctcatagtgcggtgagttatcaggataaggattttctgttatttggcccagaaactcgcggtttacctgccagtattctggatgcgttaccggcacagcaaaaaatcaggattccaatgcaaccagatagccgcagtatgaatctatcgaacgcagtttctgtggtggtatatgaggcatggcgccagctgggatataacggcgcattggtgaaagagtaagaaatttgtcagaaaggggctcagagtggccccgttcgattaatagcaggaatcagataccgtcgccgtattcaaaaccttggctgacgccgttgaagtgctggtccatatccagggagggtttatcactgtccggtttacccacgatccgagccggtacacccgccgcagtggtatgaggcggaaccgcttgcaataccacagaacccgcaccaattttagcccctcgacctacctcaatattgcccagaattttcgccccggcaccaatcatcacgccttcgcgaattttaggatgtcgatcgccgctggttttaccggtaccgcccaaggtgacggattgcaaaatagaaacgtcattttcaacaactgccgtttcaccaatcacaatacctgtggcgtggtccagcatgatgccgcagccaatggttgccgcagggtggatatcaacaccgaaagccacagagacttgattttgcagataaatagccagcgctttacgctcttgcgcccataaccaatggccaattcgataggcttgtaatgcgtgaaaacctttcagatacagcagtggcgtagagtatttatccaccgcagggtcacgcaagcgcacagccaaaatatcgcgcgcggcggaaacaatcatatggggatcgctgcggtaagcgttttcgaccacttcccggatagcaatagcaggcattatgggatcggctaatttattcgccagaatatagcttagggcactgcctaaattctcatgctttagcaatgtcgcatgaaaaaagctggccagcatgggttcacaatcagccagcgcccgcgcttctgatttaatgctgctccagacctgctctaattcttctgacgacatgccttactctccctatgatacaaacaagtcaccccgaggaaaccccaaggtgacttagtacgcattgatctaacgggttaaacgccgcttttttcgtcttttttggtgcgccctaataaggtcagggcagcttcgcgggcatttttatggcagtacagcacctgatagatctgttcggtaatgggcatttcaacaccataccgttgcgccagagctaatacttccttggtatttcgataaccttcgacaacctggccaatcttgtcctgcgcttcttgaacccctgcgccctggcccagcatgataccgaatctgcggttgcgagattgattatccgtgcaggttagcaccaaatcacccagccccgccatgcccataaaggtggaaggatcggcacccaacgcggaacccaaacggctcatttcggccaaaccacgggtaatcagcgccgttcgcgcattcgcgccaaaaccgatgccgtcagacatacctgcaccaatggcaatcacgtttttcaccgcgccgccgagctgcacgccgataaaatctgggttgctgtaaacccggaaacttttaccgcagtggagcagcgcttgcaggtcttcgctgaactgagcgtccgttgaagccaatgcaatcgccgtgggcattcctgccgccagctctttagcaaaagtcggcccggaaacaaccgccagcggaattgtatcgccgaggatttcccgtgctacatcctgtagcaaacgcccggtttcagcttccaaccctttggttgcccaaacgatacgcgcatcgctgcgtaaatggggttttaactgatgtaaaacgttgccaaaaacgtggctcggcactaccaccagaatattacgactgaccgccagtgcgcgggacaaatcggtttctagcaataatgtgtcggggaaagggacgtccggtagaaaagcctgattacagcgagcatcctgcaacgcctgaatgtgtttgggatcgtgtccccacaacacaacggtgtgaccattacgcgctaacgtgatggctaatgcggtgccgtaagatccggcaccgattacagtcattgaagcatcagtggtgttcatcaggcatcctgacgttgttcggcaccttcgccttcagtttgagcctgctgctgcaaatagttcatgaacagggcatcaaaattaaccggtgccagattcagctgagggaaagtaccgcgggaaaccaggctggtgatacattcacgggcatacgggaacaaaatgttcgggcagtatgcgcccaggcaatgtgccagttgggtgccatcgatgccagcaatggagaaaataccgccttgctgaacttcacacaagaatgcagtttcttcgcccagagaggccgtaactgttacgcgcagtaccacttcatacacatcttcagccagctgactggaagcagtatcaagatcaagtttaacttctggctgccaatcctgctggaaaacctgcggtgcatttggcgcttcgaaagagatatccttggtataaatacgttggatctggaaagccatctctgtgttgttttgttctgacatgtgtaaaagtacccttagttagacatccttattaaacagcactaccgccgtgggaatccccatcgacgagtttaaagcagtgggtcaagcccaccgcgcgcatccagcgcatgtaaatcatcgcagccacctatgtgctgcccatcaataaatatctgaggtacggtggaacgtccgctgcgttcaatcataacttcacgcgtcgccatatcaccatcaatcgcgatttcctcgaacgctgcacctttgctgtttaacagcgcttttgcgcgaacgcaaaacgggcaggtcgctttggtgtatatctcaattttcgccattgacaaaacctcagttatattaatattccgttgataaagcgatggttttattacttaccacgttttatttaccgcgagccagaggcagattttcaccgctccagccagagataccctctttcagagtaaatacaggttcaaaaccggctttgttcaaattttcggcagacgtacgagacgcagtaccgttagcacaaacaacaataataggctgcgctttatgcttttccaactcgcccaagctgccgtttttaatttcagtcggcgttaggttaatggagctggcgatatggcccttgcggtaatcttcgcgcgaacgggtatcgacaacaaccgcatcttctttgttaatcaaacgcgtagcttcaccacgagtgatttcttttactttagacaggctgcttttaaaggtggtgacgatcacggcaaccagcaaagccacccaagccagactcaaaataggatgctggctaatgaattgcataatttcttgcaacatagggggaaaaactcccgttagttaggggtcaatattcaaggtcacagagtatacctgcgcgttgcagcaaatacagccagtaagcaagtggtattgcagaaactgagagggatcgcggaaagttttcatcatttaaaccaccacaatcacgcccatcccacgccaaccttgatctctttgggctatttttaacctgctttgtagtaaaattacgaaagcgataagtgtcaatagccatgagcgacccacgtataacccatgcctattaacacttggacttataagaaaatgaggttaagcaatgtcgagcaataaaaaaccattagttctgactattctggatggctatggccaccgtgaagaccatcaggataacgctattttgaatgccaaaacgccagtgatggaccgcttgtggcagcaaaatccgcacacgctgattgctgcttccggtctggacgtcgggttgccagacggtcagatgggtaactctgaagttggccacgtcaatctgggcgcgggtcgcattgtttatcaggatttaacccgcctagataaagagatcaaagagggcgatttctttgttaacccgacgctgaccgccgccgttgataaagcagtaaaagctggcaaagcggtacacatcatgggcctgctatccgccggtggggttcacagccacgaagcgcatattctggcgatggtcgagctggctgcccaacgcggtgccgagaaaatctacctgcacgccttcctcgatggccgtgatacgccgccgcgtagcgccgagtcctctttgaaaatgtttagcgataaatttgctgcattaggcaaaggccgtatcgcctccattattggtcgttactacgcaatggatcgcgataaccgctgggatcgcgtccaactggcttatgacctgctaactcaggccaagggcgagtttaccgcagccaacgccatgcagggtttggctgatgcctatacccgcggcgaaaacgacgaatttgtaaaaccgacggtgattcaagccgctggcgaacccgatgccgctatgaatgatggcgacgcgctgatctttatgaacttccgcgccgaccgcgctcgtcagatcactcgcacctttattaatccagactttgacggcttcaagcgcgataaagtagttaacttcggcgatttcgtgatgttgaccgagtatgcagccgatatcaatgctgcctgcgcttatccgccagcatcactggttaatacctttggcgaatggttaatgaagcacgataaaacccagttacgcatttctgaaactgagaaatatgctcacgtcaccttcttctacaacggcggcgttgaagaaccatttaaaggtgaagaccgtattctagtgaattcaccgaaagtggcgacttatgatctacagccagaaatgagttctgccgagctgaccgaaaaactggtcggggcgatcggcagcggtaaatacgatgtcatcatctgtaactatccaaatggcgatatggttggtcataccggtgattatgatgcggcagtaaaagcgatcgaaacgctggatggctgtattgcacaggttgttgatgcagttaaagctgctgacggtcagttgctgattaccgcagaccacggcaacgccgagcaaatgcgcgatccggcgacaggtcaggctcacaccgcccacaccagcctgccggttccgctgatttacgtcggcaataaaccggttgccgcggtggctggcggtaagctttctgatatcgcgccaaccatgctgtcactaatggaaatggaaatcccgcaagagatgactggtaagccgctgttcatcgtggaataatcctttcttatgaaggataaggcgttatttgcacgtttgatggtgactgaaaacgcaacccccggcagcagccaatccccagtgggcctgctgccaacccggtttacgcgtcgtccgttagccatactgtacgccagcgttttttgcgctggcgtcttgctattgccattatccagccaggctgcagatgctcccgttgctgcaaaaacggccgataacaagagccaattgaaaactattcagcaaaatattgctgaaaaagagaaaagcgttcagcaacaaaaacagcaacgcagcgcactgctcgatcagctgaaacaacaagaaaatactattgcccaagccagccgtagcctgcgcgacacccaagccactttgactgagttgggtaaagacgtcgccaagctcaacggctcgattgaaaaactgcaaagtcagcagtcactccagcaaaatattctagctaaacagttggatgcagcctttaaacaagggcagcacagcggattgcaactcattcttagcggtgaggaaagtcagcgtagcgaacgcattctggcctatttcagctatctgaatgaagcccgtctgaaatcaatcaatacgttaaaacagactcgaagcgatctcgcggtgcagaaaaaaacgctggtagaaaaacagcaacagcagaaatccctattgaacgaacaacagtctcagcaacagaagctggaacaggctcgttcagcacgtaaaaaaacgctgatttctctggaagcctcgctggaaaaagaccagcagggtctggcggaactgaaacagaatgaaacccgtctgcgcgatcaaatagccaaagcagaacgggaagccaaagcccgcgctgaacgagaagccaaagaggccgcgcgggttcgagagcagattaagcttaaagagcaacaagcgaagaaaaccggctctagctataagccgagcgaaagtgagcgctctctgatggcacgtaccggcggtttaggtcgcccaagtgggcaggctttgtggccagtacgcggtaatgttacacatagatttggtgaagtattacagggagaactacgctggaaaggtatggttatttccgcgccagaaggcagcgaagtcaaagccattgccgatggccgcgtcctgctggccgactggttacagggctacggtctcgtcgtcgtcgttgaacacggtaaaggcgatatgagtttgtatggttataaccaaagcgcgttagtcagcgttgggactcaggttagagccggccagccgattgctctggtcggtaccagcggaggccagggtgagccttctctgtatttcgagatccgtcgtcagggacaggcggtcaacccacaaccctggttaggaagatagggaattgaattagggaaaaagcattgcgctattttaaagctcgctcactgtttgtattcggcactttgctgatagcctgctccgcgcaggcaggaaaattatctattgttatcgatgacttcggttatcgcccgcagaacgaaaacaaaattctccagatgccgttaccgatctcggtggccatcttgcctaatgctccccacgccaaagaaatggccatcaaagcccacagccaagggcgtgaggttcttatccatctgccgatggcacccttgagcaagcagccattagaacgggatactttgcagcctaatatgagcagcgaagaaattcagcgcattattcgtcaggcggtaaacaacgttccttacgccgtaggtatgaataatcatatgggtagcgcaatgacttccagcctgtccggaatgcaaaaagtcatgcaggcgctggaacattatcagctgtattttctggatagcgtgacaatcggcaatactcaggccagccgggcagcggaaggcactggcgttaaagtcataaaacgcaaagtttttctggatgatgtgcagaatgatgcggctattcgtcagcagttcaatcgcgccattcagctagcgcgtaaaaatggttcggctattgccatcgggcatcctcatccctctaccattcgggtattgcagcagatgctgccggaattaccgtcagatatcgtattggttcgccctagtgcgttactgaatgaaccggtgcagcataattcaggcacgctgacgccagtcaagccggttaaatcacgcgatccgtttaaagacagcaggttaaaagccattaagcaatgtaaaatgaaagcgggacatacgccagagaaaatctacgccgacgagatgtttaaaattctgggggaaagtctgatacaaagcccagtggcgactttcgtgcagcagcgctggcatttctggtttaacaaaaccaaataaaacaatgccgggtcatcatgcccggcattgtttatctacctgatagaatctcagttagccgttaatcccagctcaatacgactttccctgattgaccagagcgcatagcgtcaaagcctttctggaactcatcgatagagaaacggtgagtaatgattggtgttaaatccagaccagactgaattaatgcagccattttgtaccaggtttcgaacatctcgcgaccgtagatacctttaataaacagccctttaaagataacctgattccagtcgatagacatatcggatggcggtatccctagcatggcaatgcggccgccgtggttcatcgcattcagcaaagtacggaaagctggcggcgcgccggacatttccagacccacatcaaaaccttcggtcatacccagatcagtcatcacgtcgttcaggttttctttactaacgtttaccgcgcgagtgacgcccattttgcgcgccaaatcgaggcgatattcattcacgtcagtaataaccacgttacgcgcaccgacatgtttacacaccgctgcggccatgatgccaataggaccagcgccggaaaccagcacatcttcccccaccagatcgaaggacaatgcagtgtgaaccgcgttaccaaacggatcgaaaatggcggccagctcatcgggaatgttgtcaggaattttgaacgcattgaaggcaggaatcaccagatattcagcgaatgaacccgggcggttaacaccgacgccaatggtattacggcacaggtgagtgcggcctccgcgacagttacggcaatgtccgcaggtaatatgcccttcgccagaaacgcgatcgccaatggaaaaacctttaacttcctgaccgatagcgacaattttaccgacgtattcatgccctacaaccataggaaccgggatagttttttgtgaccattcatcccagttataaatatgcacatccgtaccgcaaatcgccgttttagcgattttgatcataatgtcattgtgacccaattcaggctgaggcacatcggtcatccaaatgccttcttccgctttcagcttagatagtgctttcattgaaattccttatgcaataacgcctagttgtttaccaatgcgcacgaatgcattgatggtacgttcaacctgctcagtcgtgtgttcagcagacatttgggtgcgaatccgcgcccgacctttcggcacgaccggataaaagaaaccggtaacgtaaataccttccttcagcaacgcgttagcaaattcctgcgctaatttagcttcgcccagcattaccggaataatcgcatggtcggctcctgccaacgtgaaaccagccgccgtcattttttcgcggaatagacgggcgttagcccacaggcgttcccgcagagcatccccttgttccagcagagaaaggacttcaatggacgctgcaacaatcgccggagccaatgagttagagaacaggtacggacgtgaacgctggcgcagccattccaccacttctttacggcctgcggtatagccgccggatgcgccgcccaacgctttacccaaagtaccagtgataatatcaacacgacccatcacttcgcagtattcatgggtgccgcgcccgttggcaccaacaaagcctactgcgtgggaatcatcaaccatcaccagcgctttatattgatcggccaaatcacaaacgcctttcaggttagcaatcacgccgtccatagaaaacacgccatcagtggcgatcatgatatgacgagcgccgtccgcttttgcctgcttcagttgggtttccagctcagccatatcattgttagcgtagcgataacgcttggctttacacagacgcacgccgtcaataattgacgcatggtttaacgcatcggaaataatggcatcttccggccccaacagcgcttcaaacagcccgccgttggcatcaaaacaggaagaatagagaatggcatcttccatccccaggaagctggcgatcttctgctccagctgcttgtggctgtcctgcgtaccgcaaataaagcgcacggaggccataccaaaaccgtgtgtgtccatcccttttttcgcggcagcgatcagcgccggatggttagccagccccagatagttattagcacagaaattgattacatgacttccatcagctacagcgatatcgacttgctgggcggaagtgataatccgctcttctttatacaaaccttcagcacgggtagtagccagttgttgttctagttgttgatagaaagacgcgggcattcggttatctccagatttggcaatttcgcctcacattttactaagttgctggcttactgacgagaaaccttgttagagaatgtaagaaatgcagcatatatcacggggaactatcctaaagccccatacaaaaagggcgattaccccccttccggctgtgcgcttacgcatgaaatgttatgatggcaccaaataatgtgtagggcattgtgcccaaccaagcagattaataagggtgaacctgatgattatcgtcactggcggcgccggttttattggcagcaacatcgttaaggcactgaatgatataggatataaagatattctagtggtagataacctgaaagacggcactaagttcgtcaatctggtcgatctggacatcgcggattacatggataaagaagattttgtcgctagcattgttgccggtgatgatatgggcgatatcgacgccatcttccatgaaggcgcttgctcctctaccaccgagtgggatggcaagtacatgatggataacaactatcagtactccaaagacattctgcatttctgtctggatcgcggtattccattcctgtatgcctcttcagctgcaacttacggtggccgaaccgataatttcattgaagatcgccaatatgagcagccactgaacgtttacggctactcaaaattcctgttcgatcaatatgttcgtgaaattctgccgcaagcggattcacaaatttgtggcttccgctatttcaacgtctacggaccgcgcgaaggccataaaggcagcatggcgagcgttgctttccacctgaacaatcaaatcaacgctggtgaagcacctaaactgttcgctggcagcgagaactttaaacgcgatttcatctatgtcggtgacgtagctgcggtcaatctgtggttctggcagaacggcgtttccggtattttcaactgcggaactggccgtgccgaatccttccaggcagtggcggacgccgtggtggaataccatcagagcgggccagtggaatacattccattcccggaaaaactgaaaggtcgctatcaggcattcactcaggccgacctgaccaacctacgcgcagccggttatgacaaaccgttcaaaaccgtcgccgaaggggtaaaagagtatctgggctggttaaatcgccctatttaagtcattcgctgcaaggaattgataacggtatgagaatactggtcatcggcccttcttgggttggcgatatgatgatgtcgcaaagtttgtaccgcaccctgaaggccgaatatccggcagcagagattgatgtgatggcacccgcgtggtgccgtccacttctggccagaatgccagaggtgcgccgcgctatcccaatgccgctcggtcatggggtatttaatctggaaggccgtcgccgtttgggtatcgctttgcgcgaggaagcctatgatcgcgcctatgtcttacccaattcgttcaaatctgcgttaataccctacttttccggtattcgtcagcgtacaggctggcgcggtgaaatgcgttatttcctgctcaacgatatgcgcattctggataaacaggctttcccgctgatggttcagcgttatgttgcgctggcttacgataagtcgcgaattacttccgaagccgatctgccgcagcccattctctggccgcagttacaggtgcaggatgaagaaattgcggaaaccaccgccgcttttaatctcagcgataatcggccaatcatcggtttttgtcccggtgccgaatttggcccagccaaacgttggccgcactaccattacgccactttggcacaaaaactcattgatgacggttatcaaatcaccctgtttggttctgaaaaagaccataaagcgggagaagatattcgtcaggcacttcaggcagaaagtcgcgatttctgcctgaatctggctgggcaaacgacgctggatcaagcggtaatactgattgccgcctgtagcgccgtggtgagcaacgattccggcctgatgcacgttgccgccgcgttgaacaaacctttggtggccttatatggcccaagcagcccagccttcacaccgccactttcagataaagcgacggttattcgtttgattaccggctaccacaaagtgcgcaaaggagatgccgatcaaggctaccaccaaagcctgatcgacattcagccagagcaggttttggccgcactacagctgcagttggcaacacagtcttcaacggtaaatgaggcgcactgatgcacgtattgatcattaaaacctcatcgatgggtgacgttttgcatacgttacccgctctgaccgatgcaatgagcgccattcccggaatccgtttcgattgggtggtagaagaagggtttactcagattcccagttggcatccggcggtggataaagtgattccggtggccattcgccgctggcgcaaaaactggtttggtagtgatacacggcaagaacgctgtgacttcaaacgaatcgtgcaagagcgcagctatgatttggtgatcgatgctcagggcctgataaaaagcgcggcgctcatcacccgcattgccaagggcacccgacacggcccagattgcaaaagcgcccgggaacccttcgccagttggttttataactgccgtcatgaaatagacaagcagctacatgccgttgagcgtactcgccagctctttgctaaaagtctgggttataccaagccggaaaccgtcggtgattacgctatcgctcagcgtttcctcagccagttaccgccagacgctgggcaatatctggttttcctacatgcgacgacccgtgacagtaagcactggccggaaagccattggcgtcagttaattcagttggttcaacctactgggctgaaaattaaactgccgtggggcgcagagcatgaatatcaacgcgcagtgcgtctggccgataatttccctcacgtggaagtgctgccaaaactgagtttacagcaagttgccgaggtattagccggtgccaaagctgtggtttccgttgataccgggctaagtcatctaacggcagcgttagcgcggcctaacatcacgctgtttggcccaaccgatcccggattaattggcggttatggtgaaaatcaggtatccgttatctctaaagagaaaagcatggataccattcaagccaaaattatcatggcagaattggataaaatcatcgtctaagtgaccgaatcccctcatctgcgcagcctctctcgctgcgcagttttctcttaactctcactgattaccctttatcagacgaatattttgccgctcgcttcgctgcggaaaatattaataatatgctgttagtttttaccgtgataattaactattacatgcatgagaaaatgatatttaagtaagaataagtcatttatccgcagcgatattccggcgattaacgaaagtaattaaaggaaatctctaataaaggcgatcatcttcataacgaccaatgggttaagcaatgtcatgaagcactcagatattttatctctctgtaatacggatattttcaggttaatagataaaaaataatcaccaataaacttctcactcttatatgctgtttttcgcctttttactgtaatcagtcttattctcgataagataaaaatacccgttcaaaccagggaacgggttcggtttttatactgattaatatatgagcgggtaaaatagatcggcgctagccaccattggacattacataaccggaagagagcctttcttcagcagttatggtattattctgaataactcatataaatgaatttgatagaatgttgctgcgtttatatcaggtactcctctacctaatccaacctttgatttggctgcgattgttgctacgtagccgtaaagcccctgcttaccgtaagcgctggggagaacgttatggtttctgtgccggtaaagtggtctctggcggcattatgctgcattccgtttctgtcggtgaaactctcgcggctattccgttggttagagctttacgccaccgctatccctcattgccgattacggtaacgaccatgacgccaaccggttctgagcgagtgcaatctgcctttggcaaagacgttcatcacgtttatctcccttatgatcttcccggttccgtaaatcgttttctcgatcaggttaatcctaagctggttatcatcatggaaaccgagctatggccaaacctgattaatgcgctgcaccaccgtaaaattccattagttatcgccaatgcgcgactttctgcacgttcagccgcaggttacaaaaagattggcggttttattcgcaatatattgcgacgtatcacgctgattgccgcgcagaatcaggaagatggtgagcgttttatcgaattgggtctgaaacgatctcagttgaccattactggcagccttaagtttgatatctcggtcacaccagaactggccgcacgagcaataaccctacgccgccagtgggctgcccatcgccctgtgtggattgcaaccagcacccacgacggcgaagaagccattttgctggaagctcatcgtcaattgttattacagtatccaaccctattattgattctggtgccacgtcatccagaacgtttcccgaaagcgattgaactgacccaaaaggccggattcagctacaccttacgcagcggtggcgaagtgccatccagcagcactcaggtggtgatcggcgataccatgggtgaacttatgcttttatatggaattgccgatatggcatttgtcggcggtagcctgatagaacgcggtgggcacaacccactcgaagccgctgcccacgcgattccagtgatgatggggccacatactttcaatttcaaagatatctgtgccaagcttgagcaggccgaagggctcatcaccgtcaccgatgcagcctcgctggtgaaggaaattagcgtactgctcaccgacgaagattgccgcctctactatggccgccatgcggttgaggttctgcatgagaaccaaggggcattgcagcgattattgcatctgttggaaccttatttgccgccgcggagccactaatgagcgccaaaaaacgtctgtctgtggtgatgatcaccaagaatgaagcggatctgctcccagaatgcctggactccatttcctgggctgatgagattgtcgttttagattctggcagtgaagacgacactttggatttagctcgtcaatacggcgcgcaggtatacagtaacgttcagtggcaaggttttggcaaacagcggcagcgagcgcagcaatacgctaccggtgactacattttgatgatcgatgccgatgagcgcgtcacacctgaattaaaagcctctatcgacgtggtattagcgtctccggatgatgatgccgtgtatagctgcggccgcagaaatctgtttttggggcgttttatgcgccatagcggctggtatccggatcgggtgacgcgtctgtatgctcatcatcgatatcaatataacgataacctggtgcatgaatctgttgatgccggaaatgcgaaagttattccgctgaaaggggatttactgcacttaacctgtcgtgatttttttgcttttcagcgtaaacaactcagctacgccgaggcttgggctacacaacgccaccaacaaggtaaaagctgtagttatttctctattcttagccatactctcggcgctttttgcaagacctggctgttccgcgccggatttttggatggtaaacaagggttattgctggccgtagttaatgcgcaatatactttcaataaatacgccgccctgtgggcactcaaccaaaaataacgcaaaagcgagacgccatgatcaccagagccatttatccgggcacctttgatcctatgaccaacggtcatctggatttagtcactcgtgcgtcttccatgtttggccatgtcattttggccattgccgatagttcacataaaaaaccgatgttcacactggatgagcgcgttgcattagccagcgaagtgacagcgcatttgaccaacgtggaagtgatcggttttagcgaattgatggcaaccttcgcccagcagcataaagcgaatattctggttcggggtttgcgctcggtatcggatttcgaatatgaatggcagttagcgaatatgaatcgtcatttgatgcctacgctggaaagcgtatttttactgccatcagagaaatggtcattcatttcctcttcgttagtaaaagaagtggcgcgtcacggcggcgatatcacaccattccttcccgcgccaattaccaaggctttactggataaactctgagtttacctctgatttaatgctggcagtgacggcagaaaaacgtgctgcgctgcccatgtttcgcactttcaatcagatgaccacagcgcctgcacggctcaccggctcgaccataaacctgtaattcctgcgcaaagtaccccggtttgccatccgactgcaaaaaatcacgtagcgttgtgccgccctgctcgatagcgcgcagcaataccattttgatagttgcaactaataatccgacttctgcttcagttagcgaacccgctgggcgatcgggagcaataccggcgacgaacagcgattcactggcatagatattccccacacccaccacaactttattatccataatccactgtttaaccaaggttcgcttattgcgagacaggttaaacaggtaggaagcgctaaattcatcgcttaacggctcagggccgagatgagccagcacgttgctggttgccaaatccgaagcccatagccatgcaccaaagcggcgcgggtcggtatagcgtaatattttgccgttactgatcaccaaatccacatggtcatgtttttctgcctcggtttcctccggcaaaatccgcaaactgcctgacatacccaaatgaatgataatccagccttttggcaattccagtaacagatatttggcacggcgttgcacactcagtaccagttgatcgctcagagccagtatttcatctgaaaccggccagcgcagacgggaatttctgacgatggcatattgaatgctgtggccgaccaggtagggttcaatcccacgtcgactggtttcaacttctggtaattcaggcatttaacctccgattcaacgtgtttaccgacctttatataacaaaaaacccggccgaagccgggttttttattaatccactaaaattatttaattttagcttctttgtagatcacgtgttgacggacaactggatcgaatttcttcagttccaatttttccggcttagtacgcttgttcttcgtggtggtatagaagtgaccagtaccagcagaagaaaccagcttgatcttctcgcgaacacctttagccatgattcagttccttaatacttctcaccgcgggcacgaagttcggccaagaccgtttcgatacccttcttatcaataacacgcatacctttagcagatacacgcagagttacaaagcgcttctcgccctcaacccaaaaacggtgagagtgcaggttcggcagaaaacggcgtttggtcgcgttcattgcgtgggaacggttgttaccgctcaccgggcgcttgccagtaacttggcagactcgggacatgtctattctccaaaaatcaaatcagctcgagcttcgtatagggtatggccgcctcgtcaggctttagagcccatctcagcaaattcactgagaagactcaatgtcatcaggtcagaaacccctgtcaccaggtataaacctgctgagataggctcttcacgccaaacccaagattctcaaaggtggcgtagtatacgctctgaagcgtaagtgctcaagtcccgaacagctaaagatcccgaaaggatcgagaaaatatctctaaatccagcctcgttcagcaaaagagacacattcgccacggccaaccactaaatggtcgagcaccctaatatctaataatgagcaggcttttaccacctgcgcagtgattaaacggtcggcttggctcggttcagccttccccgacgggtgattatgcgccagaatcaacgcaacagcattaacctttagcgcttcacgcacaatttcccgtggatggacctctacgctggtgatggtaccagtaaacatctcctcatggcgaataacacgatgctggttatccaaaaacatcactaaaaatatttcccgctcacgttctgacagcaaattttgcaggtatttttgcgtcattcgcggatttaacatcgcattctctttagtcatatggtcagaaaaacatctggtggccaattcggaaatggcatgaatctgactatatttagattttcccatgcctttttgtgcacaaagcgtcggataatccgccgacatcaaacgatatagagagccaaattcggcaattaggtgctccgccatcgccatcacatgcagacccggaatgcccgttcgtaaaaatatggccagcaattcagcatcacttaacgcctcagcgccatacttcagtaatttttctctgggtccatcccctttcagccatagttccatcctagaactcccctattctcaatgccggagtatcatgccatggccggattatcctcacgacaagcatcaataaatcctgcgtgacgccacgcaaatttcagattgatcgctaacctacgttgccccctatagcaaaactgccgatgggttatgctaaaatatcgcctctttcggctttcattcggacaatcatgatgacgggactttccggcaaacatattgtgctcggtatcagtggtggcatagccgcctacaaatgtcccgagctagtacgccgcttacgcgataaaggcgcagacgtgcgggtagtgatgacaacggctgccaaagcctttatcactccgctaaccttgcaggccgtttcgggatatcccgtctctgatgatttgctcgatcctgccgcagaagccgctatgggccatatcgagctggggaaatgggccgatctggtcatcatcgctccggccaccgccgatttactggctagagtggctgcaggcatggccaacgacctgctgacaacgctttgtctggcaaccgcagccccagttgccgccgttcccgcaatgaatcagcagatgtaccgcgcgagcgctacacaggccaacctgcaaacgctgggaagccgtggcgttttgctttggggaccggacagcggtagtcaggcctgtggcgatatcggccctggccgcatgcttgacccattggaaatcgtggcattggcggaaaatcatttttctgtaaaacaagatctgcaacatcttcatgtcatggtgaccgccggtcctactcgtgaagcgctggatccggtacgttttatcagtaaccacagttcagggaaaatggggttcgccatcgctcaggcggcagcgcagcgcggcgctcacgtcactttagtcgctgggccggtcaatctgccaacgcctgccggagtcacgcgcattgatgtgattagcgctcttgaaatgcaaagcgccgttcagcaagccgcccctcatcagaatatttttatttcctgtgcggccgtagcggattaccgggcggaacaggttgctgatgaaaaaataaaaaaacagggtgatgaaatcacgctgaaaatggtgaagaatccagatattgttgctggcgtcgccgcaatgacgaaaaaacgtccatttgtcgtcgggtttgctgccgaaacccagaatgtggaagaatatgcgcgacaaaaactggtgcggaagaatctggacctgatttgcgccaatgatgtttcgctcgcagagcatggttttaatagtgataccaatgcattgcaccttttttggccgaacggagagaaacgcttgccccacagcgataaatccctgcttggtcagcgtttaatagacgagattgtcagccgttatgatgaaaaaaatcgacgttaaaattctgaatccacgtattggcaccgaatttccattgccgacctacgccacacctggctcagctggcttggatctacgtgcctgcctggatagcgcagtagacctggctccggggcaaacgactctgctgccaaccggtctggctatccacattggcgatactggtctggcggcggtaattctgccgcgctcaggtttaggccataagcacggcgtggtgttaggtaatctggtcggcttgatcgactccgattatcaggggcaactgatggtttccgtgtggaaccgtggccagcagtctttcactatcgaaccgggcgaacgtattgcccagatggtgtttgtgcctgtagtacaagccgagttcaatctggtcgaagattttgacctcagcgaacgcggcaccggtggttttggtcattctggacgccaataacctaccctaaacctcgataccgtaaaaaagctatcacataagccgcctgggcattgtatccagcgcggccggtgttcaggtttttgttaattaagtcatttttagcaagggtctaatcggacatggcagagaaagaaaatacgaaaaggaatcggcgcgaggaaatattgcaagctttggcgcaaatgctggaatccagcgatggcagccagcggatcaccaccgcgaagcttgccgccaacgttggtgtttctgaggctgcgctatatcggcatttccccagcaaaaccaagatgttcgatagcctgatcgagtttattgaagatagtcttatgtcccgcattaatttaattctgcaagacgaaaaagaaacttttaatcgtctcaggcttattctattgctggttcttgggtttgccgaacgcaatccagggctaacccgaattatgaccggacatgctttgatgtttgagcaggatcgtttacagggccggattaatcagctatttgaacgtattgaagctcagctacgtcaggtattacgagaaagaaagctacgggaaggtcagggctttgcacatgatgaaaccctgctggcgacgcaattgctggctttttgtgaagggatgctgtctcgctttgttcgctccgaattccgctatttgccaacgcaagagttcgatgcccgctggccgctagtgatggcgcaattacaataggtgacggccaatagtcagtcaccgcaaaaagtaaaaagggccaattggccctttcgtctttgcactttgttttcagcaaaatggcttaaacgccgtaattctcgcgataaacacgaaccgcggccagatgatcggccatttccggtttttcttccagataggtaatcaaatcattcaaagtcacgatagaaatgactttgcagtgataatcccgttccacttcctgaatagctgaaatttcaccgcggccacgttcctgacggtctaacgaaatcatcacgcccgccagagaagcgccctgcgcgccgataatctccatggactcacgaatagcggtacccgcggtaatcacatcatcaaccagcatcacacgcccttgtaacgggcttcccaccaggctgccaccttcaccgtgatctttcgcttccttacgattaaagcagtaaggaacatcgcgctgatggtgttctgccaatgctaccgccgttgtggtagcaataggaatccccttgtacgcagggccaaacagcagatcaaactctacgccacaatccatcagggctgccgcataaaaacgccccaataacgccagatccagcccggtgttaaacagtcctgcattaaagaagtaaggactgatccgccctgacttcagggtaaactcgccgaacttcaaaacctgtttgttaagcgcaaactcaataaaatcgcgctgataggctttcattggtgtatctcctttccagattagtgactgctgtggtcagttaccgcatctatcctcgataaaatgctctcaggcaaccgggtataaaaaaggcgactatcaggtcgcctttataaaaattattgttccaacgccgctttctgcgcctggaagatggtttctattcctccccgcgccaaagccagcaacgccagcaactcttcatggctgaacggttcgccttctgcggtgccttgcacctcaatcattcgaccatcttccatcatcaccacgttcatatcggtttctgctgcagaatcttccacatattccaaatcgcacagggcctcaccttttacgataccgacagagacagcggcgaccagccctttcatcgggttagctttcagtttacctttggcaaccaatgcattaagcgcatcggccagtgccacacaggcaccggagatagacgcagtacgagtgccaccgtcagcctgaatcacgtcgcagtctaaagtgatggtgaattcacccagttttttcagatctaccgccgcacgcagtgagcgggcgatcagacgctggatttccaatgtacggccaccctgcttgcctttagcggcttcgcgcgggttacggctatgcgttgcacgcggcaacataccgtattcagcggtgatccacccttgtccctgccctttaagaaaacgcggtacgccttcttcaacggtcgcggtgcacaatactttggtatcgccaaactcaaccaacacggaaccttcagcgtgtttcgtataattacgggtcagggttaatggacgtacttgttctagtgctcggcctgctgggcgcatgggaattctccggcgttaaatcgatattggtcgcgcattatacggccttagtgatgtaatgcctatcctgcctgaggctgcgaggctataatccctgcatcttttctttgaaacgggtacgcaacgatgatccgcagcatgaccgcctacgcccggcgtgatattaagggtgaatggggcagcgcagcctgggagctgcgttccgttaaccaacgttatctagaaacctacattcgcctgccagaacagttccgcagtctggaaccggtcattcgcgagcgtattcgctcccgtctgactcgaggcaaaattgaatgccatctgcgcttcgagatggatcctacagcacaaagttcactgatcctgaacgaaaaactggctaaacagctggttgaagcggcgaactgggtcaaaatgcaaagcgacgaaggcgaagtcaatccgctggatgtgctgcgctggccgggagtgatgtctgctgaagaacaggatttggatgctattagcaccgaactgatgcaagcgctggatattgctctcgatgactttattgttgcccgcgaatctgaaggtgcagcgctgaaagccatgattgagcagcgcctggatggcgtaagcgcagaagtggttaaagtccgagctcatatgccaaacatcttgcagtggcagcgtgagcgtctgctaagcaaattggaagaagcacaggttcaactggaaaacacccgtctggagcaagagttggtgctgatggcgcagcgtgtcgatgtcgctgaagagctggatcgcctggaagctcacgtgagagaaacgcataatattctaaagaagaaagaggccgttggtcgccgtcttgattttatgatgcaagaattcaaccgtgaatcgaacacgctagcgtcaaaatctattaatgcggaagtcaccaattcagcaattgaactgaaagtacttatagagcaaatgcgcgagcagattcagaatatcgagtaacttctcaccgcatggcaagataatagaaagcctctaaagcccgtaatctggactgaccctataaaaagttggacagtccagattacgggctcattaatatccagattgactttattcaccgataaaacgtaagttccaattaaatacgctgtagttaaacatgtagcgtatggcgacatacgtaataatcagggtagcgacgacagcctcaaaggtagccagataataaagttggtagctgtaatcttgtactaattcatacttgctcaccaaatccgctaatttatataacgctgtcgcaccaattgccattgggaaggtaaacgcagcataacccgggctaaacggcaattttagtaaacggaagaatgacatgtaaattacgcaagtcattaatatcgcaataccgaacagtaatgcacataccagtaaagaaggatttggcactacggttaaataacctgccaaactaaggctcgcaggagcagccataatcgcaatggttggcttcgctgcatccggaacttcgcggcagaacataaaacgatagatcatcagcggcagcatacatgcgtaactcaacataccgatgactaacaataaatacgcaacacccataaaggcctgattaggcaccgcaacgtcagccacaataatcccaacgggcggaacaaaccaactcggcaccatatgatgcatttctatttcttggatccgatgataaataaataccgcaagaaaaatcaggtgcactactaccgccagtgaccacaagatctcacccgccaacatactcaaattgcccaaggctttggaaaccaccatacaccccatggtaaaggtaggaaccacgctacccaccacaggatgttttaaatctgataataaaactctgaagtgaaaaataaatttactggctacggcaagtagcagcaccgatgcgattatcgccccgatattttgacctaaaccgtttaagggtaatgcattttccaggcaccaacctatacttgaaatacccagtgccagaccggcgataggcgtcggtaatcctctgattttactatgtataatttctaacatgttaccgccaaaagcataatctacataaatgaatagggcaaatatagatactcacctttgtttaggatatcctttttttattgacttagcgtttagaagaaataaacaaatggatatcacgttgaagcaattgaaagttttcctagcggtagcgcaaagcggcaatttaacggtcgcagcctcccaattgtttatgacgaaaggagctgtctctcaaaccttggctgagttagaaaaacgtctgggccaaaccctattcgatcgtcaccacgctcgtatatttattaatccggagggggaaaaattaatctcagtggctgatgagctgctttcaagaatgaaagacatcaatacattattttccgacagcgccagcgttcacaatttatttttgggttgtagtaaaaccattggcagctatattttgcctgcacttttaggtgagtttagaaatagctataactggttgcctaaaatagctattgaaaacactaacgatattctgagtaagttactcaaatttgaagtagatttggctattcttgagggaaatatcaataataaagatatcttgtctaccccatggttaacagatgaaatggtcgttatcgcaaccaaagatcaccctctcgcatacgaaaaatcagtcccgttctcagtattgagtcagcagtcatggatattgcgtgagcaaggttcgggtagccgcagttattttgaaaatcatctggcaccattgttattgcagccgaaggtcattttatctttggatactttcgattcaattttattttctgttcaacaaaatttgggaatcacctacgcttcccggcttatcatccaaaatcctttttttcacgaccatttctcagtaatcaaaacagaaacccgttttttccgctcgataagcctctgccaccatcgacaaaaatatctatctaatggtgctcaacagtggatcaattttctgattcatgcaggtaaacgacttgagtttgcacgaaataatcagatagagaattgattattagttatgtccaaaactggatataaaatagcaaaaaatattacctgtattctcaaaattcataggccagataagggatatcccatcttcggtaagtcagtaatattcgaattctttggaagatctcggtcaattagtttgtttataaaagcagcataattaataaatcagcaacaaaaaaatgaaccagtagtatctatggctaaattaataatcttaatcgatattaaatttatctttaagccaaaaagatcgtagaataatctatagagaaccaatggaaaaacctgtcaaaaaggcgtgtttcaaacgctgatttattgctctttattgcattaggattttaggtaaccaaataaaaaataatgtttttctccaagtattcctcccaatcaatctgtgtcagtctacaaatccgtaggcctaaaggcaattcgttcatttacggctactatttatggtcaggcagagtaagaaattaaataaacattttattggcttgagcctaatcatcctgcactactattaatcagtacggcagattatcactatgacagggcatgtcttggcgaaatgtatcttttcatacaggttgctgtatccaagatgcatatgaacttttcggggtatctctcatgttcgtagatcaagacacatcgatcctggacacttactttggcacccatagcccctattggcgcttggcttttgatagccaagccttggaactctccgccgtaaaaggcacgaccaatattgccgttcctcttgattcacttcaaacagcgaaagtccgcgcactgacagccattacttccagcctggaaatcagtatttctatctatggcaatccagttcatttgcatctggtaggacgaaaaattaatgacaaggaatggggaggaacagcttcagcatattcagatactgaagctgtcgcgcgcgatctggtgatgggattgtcctttgccgaacaagtcgtttccgaagctaactcggttattgtcattctggataaaaatggctccgtacaacgctttaatcgtttgagtgaagaatacactggcaaaaaagaacaagacgtcatcggtaagaatgtttttgaattatttatgacacagaaagaaggcgcatcctcgcgtaaaaacattgaaggtttttttaaaagaggtgcttcttatgaagtggaacgctgggttaacacggtaaaaggaaaacgcctgtttctttttcgtaataaattcgtgcacagcggcagcggtaaaaacgaactttatttaatctgctcaggtacagatattactaaagagagacgagcacaggaacgcctgcgtgtgctggcgaataccgatatgattaccggtttgcctaaccgccacgctattcatgagcgaatcaacagtgcgattcaaactcgcggagacgacgccgtagggattatttatcttgatctggataacttcaaaagagttaacgaccactatggccatatgtttggcgatcggctgctaaaagatgtgtcactttcgatattgagctgcttgaaagaagatgaaatgctcgcccgtttggggggagatgagtttatcgttcttattgaagatacgacgctttctgccctcgaaaatgccgcccaacgtattctcgaccaaatgcgagcccccttccgtatcggattgattgaagtttataccggatgttccattgggattgcgttatgcccacagcatggcgaaacgctggaaaatatcatccgcagcgcggataccgcgatgtacacggcaaaagaacttggcaaacggacttattctgtcttttctccggaaatgaataagaaagtgtctgaatacatttggctggataccaatctgcgtaaaggcctggaacaacatcagcttgtcgtattttatcagccaaaaatctcaactcgaaccggtaaagtcctcagcgtagaagcattagttcgctggcgatcaaccgagcggggtttagttccaccgcaagagtttatctcatatgcggaagaatccggtttgattgctcctttgggtcaatgggtattacaaacggctatgcagcaagccgttgactggcaaaagaaaggcatagatttaagaattgcagtcaatgtttcagcccgccagttggtgaatgaagcgattattaccagctttattaaatcgctggaaacctgtgaattgacctccagcttagttgatgtcgaattaacagaaagctgtctgattgatgatgaaaatgcagcgattaacattatcaaaaagctcaaagaattgggtgctgaagtccatctggatgattttggtaccggctattcttcactttcccagttagcacgtattcctattgatgcaattaaattagatcagagctttgtgcgcggaatagataaaaatcaggtcgcgcagtctttagttaaggcaatctccgttgtcgccgaaacgctccaaatgcgagttattgcagaaggcgttgaaacaatagaggaagagaatttcctagatttgttgagcatagatgaaaagcagggatttctttatgccaagccaatgcccgcagaagaactggagcattggctgagcaaacataccccgcactttccaagtaatttaacgggaaaaacctaacctaaatcgcttttggcatggtggatgtacgccgatcctgtagcatgaccaggcgttcaatataagccagatctttagcttcgatggagaaaacagagtccacccaatcttcggttatatccatcaattctgaacgcgtcagctgcaaaacgcgttggcgtgttcgtatcattgcgcgcataccgtttaattttggtcgaatagtatcaatgaaggtgcgagtagccatataagcatcccccggctgaaataatttatccaccaatccgcgactttcataccattctgccgcatgtgattccccgctccagataagctcctcggcaacacgcataccggcttttctagccaccagcgagtatcctcccatgcctgggaacagattaaaggctatttccggaaaccccattcgggcagtggtctgcgctaaaacaaagtgatgtgccagcgcagcttcaaaaccaccacctaaagcgctaccttcaatcatggcgattgagattgctccggtatcaaacccgcgggaggcggaatgaacgcaatccacgcaggctctagcgtaagccattaatgtttcacgcttgcggttttttatcatctgagcaaagaaacttaaatcacctccaacattaaacatatgtggaacaaccgaacctgtaacccagaagtcgataggcagttttgactcttttgctgcctgcgccagtgtcataatattttcaattaactcaaggttaaaacacggacgtggattcgctcgtaacagcatccacatggtatttcgctcttcttcataataagcagagacttgcgatagatgcccagcttcggtaaatgggcggcagcttgggagattaatcattttcatatattccatccaataagtgatttcaacacaggtaagcctctcggctaattcagcttgcttgaggtcgatttcccctcaaataaggcaagcaaataaatagtgagtcactggatgaaaaaagggaggatatatcgatatataaaagaataatggtcagttagatacgacatttaaatataaaaacacagttttaaaatccaccctcggaaattttgttggcattttctacatcgcaacaggctttaatcgaattagttttatacttctttggcttgtaaattaatctattcaatctaataaagcccaacattgaggttatttttatgtgaaagttataagacattatggatagaatgctgaaatattttcacttaacgttaaatgggctttgtatgctgcaaatactacattttcttttggctttgataatcatcacgctactggccttagccgcgagcaatgatcgcaagcagattcgcctacggtatattcttcaacttttagctattgaaattgcctttgcctactttttactgcattccgacattgggcttggcgcgattcaacacttcgctggtttctttgaaacgttgatgaaatttgccgcaattggtaccagcttcgtatttggtaatatgaacgaacaaggtctcgcgtttatatttctcaatgttttatgcccgattgtttttgtttcagctttaataggaatattgcaacatttccggatcttgccttgggtaattcgcggtataggtacggtgctttcaaaagtaaacggtatgggaaagcttgaatctttcaatgctgtgagcaccttggttctcggccaatcagaaaactttatcgtctataaaggcgtgattgccgatatttctcagcgccgtatgtatacgctcgccgctacggccatgtcgactgtttcgatgtcaatcgtcagcgcatatatgacaatgttagagccgaagtttgttgtggcagccttaatactcaacatgttcagcacattcattgttctttccattatcaacccttacccaacgggcgatgagcctgagataaaattaaataagctacatgatgatcaaagtttctttgagatgttaggggaatacatcctggctggatttaaaatcgccattatcatcgccgcaatgctgattggttttattgcgctaatcgccgctattaatgctttgtttaccagcatatttagcgttagcttccaggagattctcggctatgtattctacccccttgcctggctaataggtattccagcgccggatgcgctaaaggcaggcagtattatggcgaccaaattagtgtctaacgaattcgttgccatgatcgagcttaaaaaaatagcgattgatatgtccccgcgtggcctaggcattctatcggtgtttctggtctcttttgctaactttgcctcaatcggcattatcgccggcgcgattaaagggttgaatgaaaaacagggcaatgtggtttcccgtttcgggctgaagctagtttatggctctacattggttagtttattatcagcaacaatcgctggtttagtgctttgatgaaacggttggccttagagtgcaatgcctgaaggccagccatcattgaagattaaaaatcgacacagacgggcgcatcaatacgcattactgactcttgtgaaaactgcgccttgtacttatctctcagcaagttaaccgcgagatcactgtctttgctttcggcatgaatcagcatcagcgctttgctattttcttttgctactatcccgtcatgccccagccattgccctttggcttcaaacacggttaatccgtctttaaatttcggagtaacctctgagtcaacaaatgattgccactcagcgggagcaatcaccgggccttgcgggcgattcataccgaaataaagcgttgtttgcaccataggaacaccctgctgacaaacagagggaacagcctttatcgtagccgaattcgccgctgactcaggacgtataacgcatccgtttaaaataaaccccgaagcaattattcctagaataaagccggcacgccgacataagtaatttctgctgttatccatatagataggattctctttagaatagaaaatgacgctgcatgaaattagcatttagcggctaactgctgcaatggcgaaatcattacgccattacgccattacgccattacgccattacgccattacgccattacgccattacgccattacgccattacgccattacgccattacgccattacgccattacgccatgcagagtttaaataatctaactcacccatcaatagaaataataaccaaccactgtaatacatagcataaaaccccacatcggattaataaatctaatgcaaaacatacagggttagaaaatctcagtcgcgtttgaattgtgcggccattacccttgatcttttgccgcccccttgtgtgaaagactatgttacttagcgttctctatattattggtattaccgcagaagctatgaccggcgcgctagcagcaggccgtcgccaaatggacatgtttggcgtcattattatcgcctccgccacggcaattggcggtggttcagtcagggatatgttgttagggcattatccgctgggttgggtcaaaaatcctgaatacatcgttatcgttgctatcgccgcaatagtaaccacctgggtagcacctctgatgcgccatttacgtcaccttttcctggtacttgatgctatcggcctcatcgttttctcaattatcggagcacaaattgcgttagatatgggccatagctctatcattgccgctatcgctgcagtcattaccggtgtctttggtggcgtacttcgtgatatgctttgtaactgtattcccttagtttttcagaaagaaatctatgctggagtatcctttgccgcagcatggatttatatcgctctacagtacacgccgctttctcataattgggttgtcatcattacattggttactggcctgactgcccggctgcttgctttgcgttaccgtttaggattacccgtctttaaatatgagcatcaggatcattgattctctgtagctgctagcgctctataaattcaaacccctttatttgatggtgcgacaacgtagctacaagttgccgcacctccgaatcagcggcaaatgccattatttgttttacacgcttcttacctatattcgccaaagatagccattcttggttcgagcgccgtaataaatctgtccagcgttctggatagtcttcttttttagctagcttggggaaacccaacgccgccaaccactcgccaaacggccgctctcttgctacctgaaactgttgataaatcgtctttgctttcgccgctcctatacctggtacagcggcaatatcatccggtgtaaattcaagccattcaacgagattactcatcaagccatggtcgataaaggcctgccaaacacccgtactaatacctgccatattcagtcctgaacggctacttaaccaactcaaacgggcaataaattgctcattacaagaagcgggttgacggcgaaaacagcttaacgaatgaaataaagcggaatcgggggggttaacgacatgccgattctccactcgccagacaacgttatccaagcgagggataccttgccccgctaacgaaactgttatttgatcgccgggaatgacgtcccagtaccgccagcgttcaaccgatccaacattgacatttttcacccatttgtcatccagccgaataggctctagagataaaatagcgctgaccttccctgttcggcctatggtgaaattaactgatttcacctgcgtgacttgctgaaagggagagtatttccaggcaatagaccagtaaccgggctgtgattgccaatgatgccccgcaggttcttgctcttgccggataacaattccgtcggtcacaaatggcaacggtgattcaaaccagcgttgtcgccatgcaacaatatcactcgctgaagtgaccggcatactgaactctttagtcagcgaaaatcccatccgccgtaactcacgcagcttctcggtcataatcgcgggtccatcaggccatgcccaaatgaaaatacctatatcggacaacaatgccgaaggtgactttttcatcattgctcccgccaccaaagcccgggcattaataccgccagcttctttctgtttatggtgagttacctttaggaaaagttcgccgtgcaggaccagtaacggcggagcctgagaaataaagtggggaattgcaggtatatatttcactttatccgtccagttctggcctactgcaccgtcgcctcggctgatcgcttgcgtcaggtttccttgaacataggttaacgtgaccgcgacaccatcaactttaggctgaacccaaaggttttttcgttcggcgagccattcagataaagcccctttcccatggagtttttttaatcccgtatgagcaacgggatgagataatctattctgcaaactgatggtaggagaaagagcgttattaactcttttctcgggtattgctatgcatcgcacccagtgattgagccgatacctaagctgatcgtaaatatcatcttcaatcaggctattaccctgttgaaaataagcgacatcccattcttctagttgcttttccagtctggagatctctgtttcgaattcgctgagcgtccatgacgggcaatctaccgaagctgacgatctgccatagaaaatagaaaccaagagcatccccaatatgattaacttatccatgttctttccctcgccgtccttggtgaacatgagttaatccgctagcaacgaataattaaatagcccaaaagtgaaaatgcggcacatctcgaaaaatacttttttcgttactgcaacaacttgaaattgctgaatcccctacgcaaagtatgtaatttgagctttttaaatacgaaaccttgtagtgaaatgtgttgtaacgctgcatgacgcggttagcccgtgtatactgtgcgaagattcacacttctgctttttatacatcaaccctaatcaactgaaacgtcatcatggttcaaggcacgctatacattgtttccgctccaagtggggctggaaaatcaagcctgattcaggctttactgaaaacacagccgttgtacgacacgcaggtatccatttcgcatactacgcgtgcaaaacgtcccggtgaaaatcatggtgagcattactattttgtttccgaacaagagttttgccagatgattgaggatgatgccttccttgagcatgccaaagtttttgaaaactactacggcacctcacgtttggccatcgagcaaactctgtctaccggcgttgatgtctttttagatattgactggcaaggtgcacagcaaattcgtaaaaagatgccggcagcgcgcagtatatttattctgcctccttcaaaagacgagctggatcgtcgtttacgaggccgtgggcaggatagcgaagaggttattgccaaacgaatggcacaggccgtcgcagaaatggatcactacgcggaatacgattatttaatcgtaaatgatgatttcgatttggcattgtccgatttgaaaaccattattcgcgccgaacgactgcgtttagaccgccaaaaacagcggcatgacgctttaatcagcaaattattggcagactgaaccgagtttcagtatcatgcccagtcatttcttcacctgtggagtagcagaattatggcacgcgtaactgttcaagacgctgtagagaaaattggtaaccgttttgacctggtgttggtcgctgctcgtcgggcgcgccaaatccagtctggcggtaaagatgcactggttccagaagaaaacgataaagttaccgttatcgcactgcgtgaaatcgaagaaggcctgatcactaatcagatccttgatgttcgtgaacgccaagagcagcaagagcaagaagccgcagaaattcaagcggttactgccattgccgaaggtcgtcgttaattagtaattagactgtgagtctgccttgtacctgtttgaaagcctgaatctgctgattcaacgttacctgccagaggagcagattaagcgcctcaaacaggcatatcttgttgcgcgtgatgctcacgagggtcagacacgctccagcggtgagccttatattactcacccggttgccgtggcctgtatcctggcggaaatgcgactcgactacgaaaccctgatggcggcgttattgcatgacgtcatcgaagacacgcctgcgacatatcaagatatggagcaactgttcgggaaaagcgtagctgagttggtcgagggcgtatccaaactcgataaattaaccttccgcgacaagaaagaggcccaggcggaaaacttccgcaaaatgatcatggcgatggtgcaggatatccgcgtcattttgatcaaactggcagaccgcacgcacaatatgcgcactctgggttctttacgcccagataaacgccgccgcatagctcgtgaaaccctcgaaatttatagccctttagcccatcgtttgggtattcatcatttgaaaaccgagcttgaagagctgggttttgaagcgctatatcccaatcgctaccgcgtcatcaaagaagtggtaaaagccgctcgcggtaaccgtaaggaaatgattcaaaaaatcctgtcggagattgagggtaggttaaccgaagcgggtataccttgccgggtcagtggacgtgaaaaacacctctattcgatctattgcaagatgaatcttaaagagcaacgttttcactccattatggatatctatgcttttcgcgtcattgtgaaagaagtggatacctgttaccgggttttaggccaggctcatagcctgtacaagccgcgccccggcagagtaaaagactacattgccattcccaaagctaacggttatcaatcgttacatacctcattaattggccctcacggcgttcctgtcgaagtacaaattcgtactgaagatatggaccaaatggccgaaatgggtgttgccgcacactgggcttataaagaacagggcgaatccggcaccacggctcaaatccgcgcccagcgctggatgcagagcctgctggaattacagcaaagcgcgggcagctcatttgaatttatcgaaagcgtaaaatccgatctgttccccgatgaaatttacgttttcaccccagaaggtcgcatcgtcgaactaccggcgggcgcaacgccggtagacttcgcctacgcggtacacaccgacattggccatgcctgcgtcggtgcccgtgtagaccgccagccttaccctctttcgcaggcgcttagcagcggccaaaccgttgagattattaccgctccgggagcccgccctaacgctgcatggctgaattttgttgtgagttcaaaagccagggccaaaattcgtcagttgctgaaaaacctgaaacgcgatgagtccgttagccttggccgacgtttactgaatcacgctttgggcaatggccgtaagttggcagatatttctccggaaaatatccagcacgaactggatcgcatgaaactggcatcggtagacgatctgctggctgaaatcggtttaggcaatgccatgagcgtagtggttgcgaaaaatctactgggtgaccctgctaatatcgccgcgtcaggcaccagaaaactgccaattaaaggcgctgatggtgtgttgattaccttcgctaagtgttgcagacctattccgggcgacccgatcattgcgcatattagcccaggcaaaggcttggtgattcaccatgaatcctgtcggaatatccgtggctatcagaaagagccagagaaattcatggcggttgaatgggataaagtcaccgagcaagaatttattgccgaaattaaagtcgacatgttcaatcagcaaggcgctctggctaacctaactgcggctattaatgcggctgaatcaaacattcagagtatgaataccgaagagaaagatggccgaatctacagcgcctttattcgcctgacaacgcgagatcgtatccatttggcgaatattatgcgtaaaattcgtatcatgccggacgtagtcaaagtcagccgtaaccgcaattaaggcctatgaatccccaacgctatgcgcggatttgtgaaatgcttgccaccagacagccggatttaaccgtctgtctggagcaagtacataaaccccacaatgtttccgcaatcattcgtaccgctgatgccgtaggcattcatcaaatccatgcaatttggcccaccgcagaaatgaataccctgctgtctgctgccgctggcagcaatagttgggttcaggttaaaacacatcccgaaattagcggtgcggtccaacatttcaaaacccagggtatgcagattctggcgacacatctttctgataacgccgttgatttcagagaaattgattacactcgcccaacctgtattctgatggggcaggaaaaaaccggtatttcaaaagaggccttagcgctggccgatcgcgatatcattattccgatgatcgggatggtgcaatctctaaacgtttccgttgcctctgcgttgattctgtacgaagctcagcgacagcggcaaaatgccggaatgtatcagcgtgcagctagcgtgttggataaagatgagcagcaacggctgctgttcgaaggcggttatccggttttggcacaggttgccaaacgcaagggtctgcctcctcctcatatcgatgagcatggccagattattgccgagccgcaatggtggtctgctatgcaagcaacggagtcgtaaatgaaaggccacctgctcgatgccgttcccctgagtacactctccggcgttggcgcaagtcaggctggcaagttggcgaaaatggggctggaaaccattcaggatctgttgctccatctacctctgcgttacgaagaccgcacccgcctttatcgtatcggtgacctgctacctggcatttttgcaaccgtggaaggcgaagtgctgcgctctgatattagctttggccgccgtcgaatgctgacctgtcagataagcgacggcagcggtattcttaccctacgcttcttcaattttaacgctgcgatgaaaaacagcctgtcccccggcaagcatgttatcgcctatggagaagctaagcgcggcaaccacgggccggaaatcattcatccggaatatcgagtacatggagaaaatacgggtattgaattacaagagtctctgactccagtttatcccacgactgaaggtattcgtcaggcaacgctgcgtaagctcatcgatcaggcactagccttacttgatatcagcgctatcgcagagttactgccgcaggaactcagccgcacgcttatcagtttgccagatgctattcataccctgcatcgcccaccagcagatattcagttaaccgatctggagcaagggaaacatccggcacagcgccgattaatattggaagaactgctggctcataatctcagtatgctggctgtacgggcgggagcacaaagctacaaggctttgccgttgctcgctgaagaacagctaaaacaacgttttctggctaatctcccctttaaaccaacctctgctcaacaaagggttgtgggtgaaattgaacaagatctgactaaccctttccccatgatgcgattgattcagggtgacgtgggctcgggtaaaacactggttgccgctctggcggcgctgcgggctatcgctcatggcaagcaggtcgcgctgatggcaccgacggaattattagcagaacagcacgcaaataccttccgtcagtggttcgaaccactggggctggaagtcggctggctggctggtaaacagaaaggcaaggcgcggctggcacagcaggaagccgttgccagtggacgggtttccatggtggtgggtactcacgctatctttcaggaacaggtgcagttctcagggctggcgctggttattattgatgaacaacatcggtttggtgttcatcagcgtttggcgttatgggaaaaaggcgaggaacaaggtttccatcctcatcagttgattatgaccgccaccccaattcctcgcacattggcgatgaccgcatatgctgatttagatacttcggttattgatgaattacctccgggaagaacgccggtcactaccgttgccattccggatacccggcgcagcgatattattgccagggtgaaaaacgcctgtctggaagaaggccgtcaggcttattgggtctgcacgttgattgaagaatcagaattactggaagcgcaagcagcggaagtgacctgcgaggagttgaaagcagccctgccggagataaaagtcggtttagtacatggccgaatgaaagccgcggaaaaacaatcggttatgcaatcattcaaacaaggggaattgcagctgctggttgcaaccacggtgattgaagtgggtgtcgatgtccctaacgccagcctgatgattattgataacccggagcgcctcggtttagctcagttgcaccagctgcgtggtcgggtcgggcgcggtgcagtggcctctcactgtgtgctgctgtataaaactccgctcagtaaaacggctcaaatgcgcttgcaggttttacgagacagtaacgatgggtttgttattgcgcagaaagacttggaaatacgcggccccggcgaattattaggtacgcggcaaaccggtagtgcagagttcaaagttgctgatttaatgagagatcaggctatgttgcctgaggttcagcgcattgcccgtcaccttcaacagcaatatcctgaaagtgcaaaagcgctgattgaacgttggctgccagagcgatctcgctacaccaacgcttaaatattataagggaaagccattgcggctttccctttaaacaccgactttagcccgcaactgctgggaatattggcagcaacagataaagttttatcacaatcgcattgacgatatcgatgaagaaagcaccaaccattggcacaaccaagaatgccaaatgagaagggccgaaacgatcggtaatcgcctgcatattagcgattgccgtcggcgtcgcgcctaagccgaaaccacagtgacccgcagccaacacagccgcatcatagtttttacccatcactcggtaagtcacaaagattgcgtatagcgccatcgccaacgcctgaaccaccagaataaccagcattggtaaagccagggaagccagctcccaaagtttgaggctcatcagcgccattgccaaaaacagcgacaaactgacgttacccagcacggaaaccgcacggtcaaacaccttgtaaaagccaaccatagccagaccgttgctaaggatcacgccaacaaacagcacgcaaacaaaggtcggtaattcaaacattgtgccctgtagcaaggctgcaatgtgatgccctgccatcaaacaaatggcaatcatcgcaatggtttcgaccatcaccaacggcgtaatcagacggccagtagatggtttttcaaatgcagatggcagctcgctatcttccggttttccatccggcgtagaagaatgcttcaccagataacgggccacagggccgccgatcaatccacctaaaaccaggccgaatgtggcacaagccattgctacttcggtagcattttcaaaaccataacgctcgacgaacagtttactccacgccgcaccggttccgtgaccaccggaaagcgtgatagaacccgccaataggcccatcaaaggatctagccccatcagcttcgctaacgcgataccgatggcgttctgcattaatagcaggccgactaccacaaaaacgaatacgcttaacgctttcccgccggcacgcaggctggccagattcgcgttcaagcctatggtggcaaagaaagtcagcattagcggatctttgagggacatatcaaagctgatttcccagccaagagttttttgcaccagcaataacagcagagctaccagcaaaccaccggcaacaggttcgggaattgtatatttagttaggaagggaaccgattgtacgagtttacgccctagtaacagaaccagtgtggccgctacgagcgtgccataggtatcgagatgaaacatcctggtactccatgtaattaaaatatctaataaaaatatgacgttagccgaatccttaaaaaacgccaaagcaggttagggtggattagaaaaaaaaacgctgagaattacaagtttggtgagataaaaatgcgagcaggcaacaaatgcgtattttgaaaaaatcgaagcgcaaccgattgcttttgtgaagcggatcattaaaatgccccctttgccgattctggaatgccaacccatgaccacgcaatccgccgagctaaagacctcacggccggcctctcatactaatgcacccagcgaactgatttaccgattggaagatcgtccaccgttgccacaaaccctatttgccgcttgtcagcatttattagccatgtttgtggcggtgatcactcccgcgctgcttatctgccaggctttaggtttaccggcgcaggatacccagcgaattattagtatgtccctatttgcgtcaggactcgcctctattttacaaataaaaacctggggacccgtgggttctggtctgttatcgattcagggcaccagtttcaactttgtttctccgctgattatgggcgggctggcgttgaaaaatggcggtgccgatatcccgaccatgatggccgcgctgtttggtacgctaatggtcgcgtcttgcaccgagatcctgctatctcgcgttttgcatttggctcgtcgcattattacgccgttggtttccggcattgtcgtgatgattatcggcctatcgctgattcaggttggcctgacatccattggtggcggatatggcgcgatgagcgatcatacctttggctcaccgaaaaacttattactcgccggcgcggtgttggtcgttattatcctgctaaaccgtcagcgcaatccgtacctgcgcgttgcttcattagtcatagcaatggccgttggctatctgttggcttgggctatggatatgctgccagccagccaacctgctgccgaaacggctctaataaccattccaacgccgttttattacggtttatcctttgactggaacctattgattccgctgatgctgatctttatggtgacttcactggaaacaatcggtgatatcactgccacttctgacgtttccgaacaaccggtcagcggcccgctatatatgaagcgtttgaaaggcggcgtattggcgaacggtttgaattcaatggtttcagccatcttcaataccttcccaaattcatgcttcggtcagaataacggcgttattcagctcaccggcgtagccagccgttacgtggggtttgtcgttgctctgatgctgattctgttgggcctgttccctgcggtagccggttttgtacagcatatccctgagccagtattaggcggcgcgaccatcgtcatgttcggcactattgccgcatccggcgtacgcattgtctctcgcgaaaccctaaatcgtcgggcgattatgattatggctctttcattggcggtaggtatgggcgtggctcagcaaccgctgattctacagtttgctcctgattggattaaaaccttgctgtcttcgggcattgccgccggtggcatcaccgctatcgtgctgaatctgatcttcccgcaggaaaagtagcttccctggaagtgacccccataaataaatccaaatggtcgatgctattgcagcattgaccattttttattcctgattaaaggattgtctattgaggtcagggtcgaattgcggcataaacggagataacttcacgccaacagactgagatttaccagatgaaaactatcggaaaagtactcctgacgctgttactgctcctgatgttgctggtagccatcgcttatttactgttgcaaaccagttggggagctaaaaacctcagccgctgggtgagcgatagcagccaatatcagctatctctgggtaaaatcgatcacgattggtctcagccggggcagattaccttcagcgatgtcatgatttcgcaaaccaacaagcccgtctttcttaacgctgggcaggttgtttttgggctcagctggcgtcaaattaccgagccacgacacttccgcagcctactgttacaacagggcagcctaaatctggacgcgccttccccagcgttaaatattcaggccgatacgctacggctggcaaatatggcgctaaataccgcttcgcccggttcaagcattcaaggtaagaatatcactggcggtattattccgtggcaacccaaagctggcgatcgcttgggtgagaacaaccaatttcagcttagcgccgatgagctaaccatcggtgggaatgctttcgaaaatgtctttgtacaaggtacaaaaaacaaacaggcgcttaaactcactaacttcggtgccaatatcgcccaaggggaactgaccggtgaagcgagtcgcgagcaggatggccgctggcaggtagagcatttgcgtctcagtaatgtgcgcctgcaaaccgcgaagacgctggacgatctgtggcatagctatacgcaactgccgccggtcacggttaaacgtttcgatttgatcgatgcgcgagtcgaaggcaataactgggcgtttaacgatttggatctcacgctaaagaatgtggcgtttgaaaaaggtgattggcgtagcgccgacggcgagctagcgcttaatgcgggggatattatcaagggtgatatccatctgatcgaccctatgctgacgctggaactttccgataacggtgcggcgattaaacaattttctacccgctggcaaaacgggctgatccgagctaccggtaactggaaccgagccaatcatcagttacagcttaatgagctggcgattgtttctctagaatatacgttgccggaaaactggcggcagctctggcaaaagccactaccgagctggctagcagcagtacagatcaataagctatccgccagccgtaacctgctgattgatatcaatcctgatttcccattccagctcaccgcgctggacggttttggcagcgatctggtactggcaaaaaatagccagtggggagtttggtctggttcactaacgcttaatgcaggtaatgctaccttcaaccgcaatgatttgcgccgcccatcattggctctcaccgctaatgatcagcgaataaccttcagcgatctcagcgcattcacaccggaaggcttactggaagcccaagctgaaatcgggcaatccgcagagcgcccattctctctaacgctgacggggcgttcggtggatgtaaatttcttgcacaattgggggtggccaaaactgccgttcgaaggcaaaggaaatctgaatgtgcagctaaaaggcagtctggctcagagcattccctttaaaagctcgctgaacggctctttaaaggcgatagagaacggcgggcaacaagttgaccaactgatgcaggctggcgaagtgaacggcgtgacaacgccctgaggcaatataattcgggttctaactgctattctaacaactaaccgacgtcgcacgaggttgtagccgtgatctgctgcaacctcgcgcaagaggggataagcggcggttaacctgcttcggcgtcccctggcgttaccggcaacaccatataagtgcctgaaaatacggctccagcattttcatcaccaaataaattcacttccaattgcacccgcgccctacgtccacgcgccaaacgatccagatcgccactgatcgagcctaaatcggcaatggctcttggccgtccggtcactggcgcgctgtagcgaatatgggcatcggccagaataatggtaccgccgagctggcgttcacgcagtaacagccagatcaaaccccatccagtcagcgttgccagtgaaaataaactaccggcgaacagcgtatggtggggattttgattgccagcctcgggcatggtcgtcacaaaacgctgcccggtgtattggctgatacgcacgcccattttctcactgagcggaatatggtcgtaccaagcctgctgtagctgaccacaccagtctgggcgatgcaggatatcatccatggtcgccaccggcttaatcatcaaaaagtgacgtaccggcgtggtttgcggcgcggtaatttctccctgactgacaaaccccagcttgccgaagaactccaccgcatcttcacgggcgctacacactacccgcttaaccccttcctgacgcgctacggattccagcgtcatcgccaccagcgtgcctaatcctttgccctgtacagccggatccactgctaaaaaccgaatagcagcctcattatcagcattgatatataaacgaccaacggcaacgggtttcccctgctcgtccaccaccatttggtgatgcgccattgcatcataggcatccttttcggagccaacaggttgatgcagtggtttgcgtaacatttcccaacggaattgataataatctttaagttcttgttctgttatgggtacgcgtaggtgatacatagaagctatctctcttagaaatccatcaacaaaatgtattccgctaccctcagtaataacagagccagaatatccccaccctaaacctgtagccagaaagtcaccgggccgtcattgaccagactgactttcatgtccgcagcaaattgtcctgtttcagtttttacaccacgctcgcgacactgagcaacaaaatactgataaagcctgtcggcttcttctggaaccgcaccgcgcgaaaaactcggcctcatgcctttttgggtatccgccaccagcgtgaattgggaaaccaccagcaggctaccgccagcttgctgaacgttgagattcatcttgtcgttttcgtcactaaagatacggtagcccaacactcgttcacacaaacgctgcgctttttgttcggtatctccttgctcaacgcccagtaacaccaataatcccgagccaatcgtgccaacggtaacgccatccacatccacgctggcgctttgcgctcgttgaatcaaagcaatcataacaacctacatctcctgattttgcgtttcgtcacccggttcctgctttcgtaatgatcgatgctcacctaatgttacggtgatttctgctcccaacaatacgatgcaccagctccagtaaacccataaaaataaaatgggtatgaccgccaagacaccataaattaactgataggaaggaaatagcgtgatatacagcgtaaatcccttctttcctaattcgaacaaaactgccgccaccagcgcgccaaccagcgcatctttgaccggcaccggtaccgttggcaccacgctgtacagtaaccagaatgaaatccaggacagtattaacggaaagattcgtaatacctgatcgataaaactattcactccggtggttgccagccagttcaatgaaagtaaatacgaactgatcgccatactggcaccgaccaaaatcggccccagcgtcaacaccatccaatacactgcgaaggaaaagacgatagaacgcttattcttgctgcgccaaatggtattcagcacgctatccaccgagtaaatcagcaacagcgcggtgacaatcaggccacaggtacccacggccgtcatgcggttagagttggcgacaaaccgctcaatatagttttggataacattgccagcagatggcataaagttagcaaaaacgaaattcttcagttgaatactgatatccgaaaacatcggaaatgcggcaaacagcgcaaaaatcaccgtaatcaacgggactaaagacagtaatgagacataggctagatgtccagccagcatagttaagccatcgtgatctatgcgtctgaagagcattcgcccaaagctggcgctgggttttaacggcgacggtaaacgaaagcgcggaaatcctgccatattcacctcgaggtcaaaaatgggattgagagcgaagagtgagtcagaaaagggttaaccctaatgcgttaacccgtgatctcattaggaaaaataggctggaataacggttttgtcagttacatgaaccgcattaatacccaaggcctccgccgcttcgatatttgcagccacatcgtcaaagaacaccgcctgctccggagggtagttttcattatttaaaacatggtgataaatatcggcatccggtttacgcatccctaaatcctgcgacaaatacatatagtctgccgctgcagcgacctcaggataatgttgcggccaataattgcaatgcaaacggttggtattagagagcaccacaactctgtgaccttgctcgcgcagctttttcattatctcaataacttcagggcgcaaaccaacaaaaatcgcctgccaaccggtggcaaactgttcaaaactcagggaaagccccatttcgtcactaaagcggcgcgcaaaatcttcgtcgctgatttcacctcgctcatgctgctgaaaaatatcacccatggtgaaacgttcggtcaaagttgccaggggcacactgctcagtttgctccagacacccaaaacgcgtttgaagtcgatatcaacaatcacattccccagatcaaagatatacagcatagcgctctcccaaatttgaaggtgagttcactgtaacggtaaaaaagaaggctgaacagacggaggaagaaaaaggaaaggatagaattgaatatacggtggggtataaaaagaactcagggcgccaattgcgccctaagtgtctgttatagcttaaaaaggattaaccttctttgctaccacggccagcacgcttacgatcgttttccgtcagatgacgcttacggatacggatagattgcggggttacttcaaccagttcgtcgtcatcgatgaactccagcgcttgctccagggttttcttgaggaaaggaaccagagtggttgcttcatcagtaccggaggcacgcatgttggtcaattgcttaccagtcaggcagtttacagtcaggtcgttagagcgtgagtgaataccgatgatctggccttcatacacttcggtgccgtgaccgatgaacagcttgccgcgatcctgcaatttgtacagtgcgaacgcaacagctttaccctgaccgttagagatcagtacgccgttctgacgttgaccgatttcgcctggacgcacatcatcgtagtgactgaatgtggagtacagcagaccagtaccagaagtcatggtcatgaattcagtacggaaaccgatcaggccgcggctagggatggagtaatccaaacggatacgccccttgccatctggaaccatgtctttcacgtcgcctttacgctcacccatggcttgcattactgcgccctggtgttgctcttcgatatccagcgttacgttttcgaatggttcttggttacgaccgtcaatcatacggttgataactttaggacgagatacagccagctcgaaaccttcacgacgcatgttctcgatcagaaccgacaggtgaagttcaccacggcctgaaacgcggaatgcatcagcatcttcagtttcttcaacacgcagcgccacgttgtggatcaattctttgttcagacggtcaagaatctgacgtgatgtcacatacttaccttctttaccacagaatggagaggtgttaacgcagaagtacatggttacggttggttcatcaacagacagtgctggcaatgcttcaacagcattcacatcacaaatagtgtcagagatgttcaactcgcccaggccggtaatcgcgatgatgtcaccggcttctgccagattggtctcgatacgctccaggcccatgtggcccaatactttaccgactttaccgttgcgagttttaccttcgctatcgataatggtcacttgctggttaggcttaacaacgccacgtttgatacggccgataccgataacaccaacgtagttgttgtagtccagctgggagatttgcatctgcagtggaccgtcacggtcaacttttggcgcaggtacatgatcaacgatagcttggtacagcggggtcatgtcttccgccatatcgttgtggtcttcaccagcaatacccatcaatgcagatgcatagatgatagggaagtccagctgctcgtcagtcgcatccaggtttacgaacaggtcgaatacctgatccacaacccagtcaggacgcgcgcccggacggtcaactttgttgataaccacgattggtttcagaccatgagcaaaggctttcttggtcacgaaacgggtctgcggcatcgggccatccattgcgtcgacgaccagcagcacggagtcaaccattgacatcacacgctcaacctcaccaccgaaatcggcgtgtcctggggtatccacgatgttgatgcggtagtctttccaattaatggcagtattttttgcgaggatggttataccacgctctttctccaagtcattggagtccattacacgttcggttgcttcagtacgttcgccgaaagtaccggattgttgcagcaacttatcgaccagggtagttttcccatggtcaacgtgcgcaataatggcgatgttacgcagattctcgatcacagcttttttgcctcaggcatttagaaatagcgcgctattgtacacgtaataagcgagggactaaacaagatcacaaccatctcttataaacaacctgacatcggttagattgtgatcctattcacggtgcaaaaatcgcctttcggcgcactcttgcaccaatatggtgcccaatggcgcataggaagcaccaaaatagtgcaatataactatcctggtgcatactgaatatcagcagacccccatgatatggcataaatgggtggtttgaaaagttggcacagttttcgcaatactctttttaagctaaaaaagtctttttccagacaaaaatggcagctagccacaacctcagtacataacggtaatcgttccacgacgacgactatgacaaatccgggagatataagtatgtccgctgaacatgttttgacgatgatccatgagcacgaagtgaaatttattgatttacgtttcaccgataccaaagggaaagagcagcatgtcaccatcccggctcatcaagtcaacgctgacttctttgaagaaggcaaaatgtttgatggctcctcgattggcggctggaaaggcattaacgaatccgacatggtattgatgccggatgccagcaccgcagtaatggacccgttcttcgctgattctaccctgattatccgttgtgacattctggaaccaggtaccatgcagggttatgaccgcgatccgcgctctatctctaaacgtgctgaagacttcctaaaatcttccggtctggctgacaccgtactgttcgggccagagccagagttcttcctgtttgatgacgtgcgttttggcaacgacatctctggcgcttactatcatatcgatgatatcgaagcggcgtggaactctggtaccaaatacgaaggcggtaacaaagctcaccgtcccggcgtgaaaggcggctacttcccggtgccaccggtcgattccgctcaggatctgcgttctaccatgtgcctgaccatggaggaaatgggtctggtggttgaagctcatcaccacgaagtggcaaccgctggtcagaacgaagtggcaacccgcttcaataccatgaccaagaaagctgacgaaatccagatttacaaatacgtggtgcacaacgtggctcacgcatttggcaaaaccgcgacctttatgcctaaaccactggttggcgataacggttctggtatgcactgccatatgtcactggcgaaaaacgggactaacctgtttgctggcgacaaatacggcggcctgtctgaaatggcgctgttctacatcggcggtatcatcaaacacgctaaagcaatcaacgccttcgctaacccaaccaccaactcttacaagcgtttggttccgggctatgaagctccggttatgctggcctactctgcccgtaaccgttctgcgtcaatccgtattccagtgattgccagcccgaaaggtcgtcgtattgaagttcgcttcccagatcctgcggctaacccgtatctggcgtttgctgcccagttgatggctggtttggacggcattatcaacaaaattcatcctggcgatgctatggataaaaatctttacgacctgccgccagaagaagcgaaagagatcccaaccgttgccggttctctggacgaagcactggctgcactggatgcagaccgcgagttcctgacccgtggtggtgtattcactgatgattccatcgatgcttatattgcattgaaacaggaagaaatggatcgtgtgcgcatgactccacacccagttgagttcgaactgtattacagcgtctaattttaagtagcctttttttgttgccgtggaaacttttagcccatcttcggatgggcttttttctccactttatctttctttaatagtaacctgactcggcaattacgctgatttttcaggataaatgcactgaaccggtgttggagtctgctatatggcaacaggcacgctgcccgatgctgggcagatactcaattctctcattaacagcattctgctgttagatgatgacctggctattcactacgccaatcccgcagctcaacaactgctggcgcaaagctcccgtaaactttttggtacacctctgccagatttattaggctatttttcgctcaacattccgctaatgcgggaaagtctgatctcagggcaaggttttaccgataatgaagtgacgctggtagtcgatgggcgagcacatattttatcgctgacggcacaatcgctacccgaaggttttattctgctggaaatggcgccgatggataatcagcgccgcctcagtcaggagcaactccagcacgctcagcaggtggcagcgcgagatctggtacgaggattagcccacgagattaaaaacccgctcggtggcttacgcggcgcagcacagctattggcgaaggctctacctgacccatcgctactggaatacaccaaagtgattatcgaacaagccgatcgtctgcgtaatctggtggatcgcctgcttggccctcaacgtcccggtcagcatatcaaccaaagtattcatcaggttgctgaacgggtttgccagttggtatcactggaaaaaccgaataatgtcaccctgattcgtgattacgatcccagcctgccggaattggctcacgatccggatcaaattgaacaggtattactgaatatcacccgcaacgccttacaggccttgggtgaaaaaggcggcaatatcactctgcgtacccgcacggcgtttcagataacgcttcacggcgttcgctaccgtctggccgctcgaattgatatagaagataacggccccggtgtacccgcgcagcttcaggatactctgttctatcctatggtcagcggccgcgagggaggaactggcctcggcctgtccatagcacgcagccttatcgatcagcattcgggtaagattgaatttaacagttggccgggacacaccgaattttcggtttacctgcctattcgccagtgaggtttccatgcaacgagggatagtctggatcgtcgatgacgatagctccatccgctgggtgcttgaacgcgcactgactggagcaggtttaaactgtgtcagtttcgacaacggccatgccgtgttggatgcattggctacacaaactccggatgtgttgttatcagatattcgtatgccaggaatggacggtttagcgctgctcaagcagattaaacagcgccacccgatgctcccggtcatcataatgacagcgcattccgatttggatgcggcggtcagcgcctatcaacaaggtgctttcgattatctgccaaaacctttcgatattgatgaggctgtcgcgctggttgaacgcgctatcagccattatcaggagcagcaacaaccgccgcgcagccaacctgccagtgggccgacgactgatattatcggtgaggcaccggcaatgcaggacgtattccgcattattggccgcctttcccgctcatccattagcgttttgattaatggtgagtctggaaccggcaaggaattagtcgctcatgctctccatcgccatagcccacgggcaaaagcgccgtttatcgccttaaatatggcggcaattccgaaggatttgattgaatccgagctatttggtcacgaaaaaggcgcttttaccggcgcaaatcaggtgcgtcagggacgatttgaacaggccgacggcggcaccttatttctggatgaaatcggcgatatgccgatggacgtacaaactcgcctactgcgagtgctagctgacggccagttctatcgggttggcggatatgcgccagtgaaagtagatgtgcgtattattgcagctactcaccaaaatctggagttgcgggttcaggaagggaaattccgcgatgatttattccatcgcttaaacgtgattcgggttcatttaccgccgctgcgagaacgtcgggaggatattcctcgtctggcgcgctatttcttacaagttgcagccaaagaattgggcgtggaagccaaaaatcttcatccggatacagaaacggccctgactcgtttaccctggccgggtaacgtccgtcagttggaaaatacctgtcgttggctaacggtgatggcagctggacaggaagtactgattcaggatttgccgggagagctgtttgaaaccgtctcgccaaatgccgaagaccagaaacagcaggatagctgggccacactactggctcaatgggcagacagagctttgcgttctggtcatcaagatttgttatcggaagcacagccagaaatggagcgcactttgctcaccaccgctttgcgccatactcaaggacataagcaagaagccgcacggttactgggctggggacgtaacactctaaccagaaagctaaaagaattgggaatggaatagtcgagaaataacgccctcagtcgcagctatagctctgagggcgattaatcatcagataacgcgggagaattgctgtttacgtgcctgttttcgcaaataaatatcaaaacacatacagatattgcgaatcagtaaacgacctcgagatgtcacccgaatgcccgtttcgtctcgctccaccagcccatcgtcttcaaactgcgccagcaaagccaaatcttcggcaaagtaatcagcaaaacgaataccatactgttgctcaatcggtgcgtaattcagctggaaatgacaaattagcgttttaatcacgtcacgacgaatgcagtcatcctcggtcatcgccagcccgcgccacaacgcatttcctcgttcctcaacctttgcgtaataggttttcagatctttttcattttgcgcgtagctatcgcccaacatgctaatcgccgaaacgcccagccccagcagatcactttcaccttgcgtggtataaccctggaaatttcgatgtaatgtcccttcccgctgcgccaccgccagttcatcatccggacgagcaaagtgatccataccaataaattgatatcctgaatctgtcaggaaactgatcgtgtgctgcaaaatgtccagacgctgttccgggctaggcaaatcttcatctttgatttttcgctgagccgcgaacaatgaaggcaaatgagcgtaattgaacacgctcaagcgatctgggccaagctctgctacccgttttagcgtgaaagcaaaactttctggcgtctgcttcggtaaaccatagatcaaatcaatattggtcgatttgaatcccaccgctttagcgcgagcaatcagcgcaaagataaagtcttcgtcctgttcacggttgaccaatcgctgaacttctttattgaaatcctgcacccccatgctcaggcggttaaagccttcggcacgcaggtgatcgataacgtctagctcaatttcacgcgggtcgacttcaatggattgttccgcttcgggtaaaaaatcaaaattatcccgtagcaaattcattaactgcgtgatttgtgtgttattcagataggttggcgtcccgccgccccagtgcatctgactgacctgacgccctttgaataagcttgcgcgctgacgaatttctttttccagtaccgccagatattcatcagccttatgctgctggcgagtaaccagcttattacagccgcaaaagtagcaaagcttatgacaaaacgggatgtggacatacagcgaaagcggtcgctcagggtaacggccaaccgcccgttcataagccgcatcatcataagattcgctaaactcaagggcggtgggatatgaggtataacgtggacctgaatagttatatttttgaattagggccagatcccaaacaacagcgttctcagacattgttcattccttccgatatttttttctaccgggccggttaaaaggcgattgtttacgttgtctggccgcggaagcgctgcgcaggcgggatttccgctgcgacagccgccatagtttacccaataaccacactagataacatgtaagtagtagggttatcgtcgggatcacccaattcatagcttagaatgcgtctttattaccgcgtttcagtaactgtaagatatcttcctgcttctcttcaggcttttcatcatcttcgtcatcaccaagttcaatacccagctgttccatcaatgcgtcgatgcgatccaacgtcagatcgacataagcctgatcttctttgctcaatacttcgtcattatccagacgatccagtaatgcatccaggcgttcgtcattttccagcttagccagctcttcttccggtgtcagacgtggtttggctacaggcttaggcgcagcaggcttagctttaactttgccttcaaccaccagcggtacaggcactttactgccgatacgcggatctttttcctgaacctgagtctggcctttcttgttgttggcctctacgttggttctcgcacctgagcgattaccgctgtgtcttttctgacgtttacgttcgcgagcttcaagatcaagctctacgcgtgtctttttattacgctttggtgttgcggttttgccgcgcggtgctttcgttggctggttcataacctgtgctcttaaattaggtaaataaatataggattggatttagtataggattgcggcggaatctagcagaaagcagacaaagaaaaaaggcggcaggttgccctgtcgccttttttcgcaccttctgcggaaggatatccttacagcgcaatccgtgcgcttatccaacttccctgtttatcccttgactacacgacactccatgtcggtctgtccgtaaaatttaccgctccttgcagccttcctttgctccgcccgatcctggcatttactcgttcttccttgccgacttgaaagtcaccatcctgactcatccgtgggtcatcgtccttaatctctgctgattcctttcgattccctgagacaacaacccatcccgagtcgctgataatttccttttggtacatcccagtaccggcgataactttactagcccgttgtttttactcaagacacttacaccaatgcggactggttcaattatcaccgtattgataatagattgtttttaaagcaagatttcttaacaatacttaaaaaataagacatcgccgcagcaaaaaatgggcaatcgcttacaaaacatcaagttccagagccatttttctcgcatactgagttaatcgagataaaccccccgctttcccgccgatgtagttataatccccccatgttagctatctcttacggagacgaaaaattttgaccattaaaaactataactatcatatgacccatttcgtcatcagtgctccggatattcgccatcttccgcgcgacgaaggcattgaggtcgcatttgcgggccgttccaatgcgggtaagtccagcgcgcttaacacattgaccaaccaaaaaagtctggcacgtaccagtaaaacgccgggacgtactcagttgatcaacctgtttgaagtgaccgatggtatccgtctggtggatttaccgggttacggttacgcagaagtacctgaagaaatgaaaatcaaatggcagcgcgcgctgggtgaatatttacagaagcgtaactgcctgaaagggctggttgtgttgatggatattcgccatccattgaaagatctggatcagcaaatgattacctgggccgttgctgtaggtacgccagtgatgctgttactgaccaaagccgataaattggcttccggtgcgcgtaaagcccagttgaatatggttcgcgaagccattattcctttcatgggtgatattcaggtcgaagcgttctcttcactgaaaaaaattggcgttgataaactgcgggaaaaactggacacctggttcagcgaaattccgccggaagtgatggaagaactggaagacgacggcgagtaagcaagattccgcactgtgattaaccggtttatctcttaatcctccactctacgggcggcagcctctggttgttgcccggtattgcttcccagacttaaccccgcgtccctgtttcttccccaaattgcattctaacgctgaataaatcggccaatggccggattgcgcccataaaaaacgccccagtcaataaatgactggggcggctaaaatattcagccaaatccgattacgtgaagtaaaaggtctgaaagatagaacatcttacctctgtaccctacatctgtaactctacatcattttttcgcagggcaaaagaattttttgttgtatagttacacaaattggcacgattcagcggtgaggaaccgagcataatcggcacctaatgtagcttaattacataaaacgctttaataatcgccacttagtgagcctgatcccaattcttacccacgccgacatcaaccttcaacggcacgtccaattccatgctctgttccatcagatcgcgaatcttctgagtggcactttccagcacgctttcatgcacttcaaacaccaactcatcgtgtacctgcatgatcacacgaactagaggctcttcctgctgttgtaaccagttatctactgcaatcattgctcgcttaataatatcggcagcggtgccttgcataggcgcattaatcgcttcacgctccgcagctttacgacgagtggcattacgggagttaatatcgggcaggtacaagcggcgcccatccagagtggtcacataaccttgctcggccgcttgtttacgcgttctttccatatattccagcacccccggataacgctcaaaatacagatccatgtaacgttgagcttccccacgcggaatattcagctgacgcgccaaaccaaaggcgctcataccgtaaatcaaaccaaagttaatcgccttcgcgctacggcgctgctctgaggttacattttccagcgccacgccaaagacttctgccgccgttgcccggtgaatatctttacccgcagcaaaagccgccagcaggcctttatcctgtgaaagatgcgccataattctcagttcgatttgagaataatcggcagccagaatgctgtaatcggttggtgcgataaatgcctgacgaattcgtcgaccttcctcatttcttacaggaatgttttgcaggttaggatcgcgagaagataaacggccggtagccgttaccgcctgatgatatgaagtatgtactcgcccggaaaccgggttaatcattaaaggtaacttatcggtataggtacttttcagcttggccaggccacgatattcgagaataaccttcggcagcgggtaatccagcgccagttctgccaacacttcctcattggtggacggcgcgccgcccggcgtttttttcaaaatgggcagtttctgcttttcatacaaaatggcctgtagctgcttcggcgacgccagattaaaaggttcgcctgccaattcgtgcgcctgtttctccaattcagccaaacgaatggttaattcttgagaatgcgtagaaagaatagattggtcgattaacacgccggtgcgttctatatgcgacaaaaccggcagcagcggcatttcaatttctcggaaaatacgcagtaaaccttcgctttcctgtagcttcggccacatggctaaatgcaattgcagagtcacatccgcatcttctgccgcataaggcgaagcctgttccagtgcaatctggttgaaagtcagctggttcttaccttttccggcaatttcttcaaaagtaatggttttatgattgagataacgctcagacaggctatccatatcatggcggccagcaacgctattcaacacataagattccagcatggtgtcaaattcgatgccacgcagatcgatatcataacgagccagcaggcttttatcgaacttcaggttctgcccgactttatgcgatttcgcgtcttccagcagcggtttaaggtgtgccaatacccaatcacgatccagctgcgctggcgcgtccagataatcatgagctacgggcagataagccgcttcaccgggagcaatagcgaaagaaagcccgatgagattggcagtcaaagtgtctaaaccgtcagtttctgtatcaaaagcaaagacatcagcctttttcagccgctcaaaccaatcgaagaaagtttcttcatccaaaatggtctggtagttttcttgtgaaagctgtgccgtcacctcagcaatcggagcagcaatatctacagcggcggcagctttactatcactcttacccgtccccgtcgggcgcggtttattgccctccagccactttccgccttctaaatcaaccagccagcgtttgaattcataacgcccaaataatgtatgcagctgatcgacatcgggagccgaaaccgtcaactcgctacaagtcacatccagctcaacatcagttttaatcgtagccagtttataagagaggtaggcaacgtctttgttctgttccagcttggcagccatggttttcgcgccgcggaaagtcagggtcgcgattttatccagattgctataaagcgtatccaacccacctaagccttgtaataacgcctgcgcggtcttttctcccacgcccggcacgccaggaatgttatccgacgcgtcccccatcagcgccagaaaatcgatgatcagttctggaggtatgccatatttttcgcatacttcttctggaccaaggatggtgttgttcatggtattgatcagggtgatatttggcgtgactaactgcgccatatctttatcaccggtgctgattaatactgagtggccggctttctcggcttcctgcgccaaagtgccaatcacgtcatcagcctcaacgccagaaaccgctaacagcggcagccccatcgctttcaccatttggtgtaacggctcaatctgcgagcgcaaatcatcaggcatcggcgggcggtgagatttatattcagcaaatagctcatcacggaaggttttacctttggcatcaaaaactaccgcaacatggcttggatggtactgtagcagcaggctgcgcagcatgttaagcacgccatacatcgcacctgttggttccccgctggcgttggtcagtggaggaaatgcatggtaggcgcgatagaggtaagaggagccgtcaaccaggattaaggggttttctgcgatttgtgccataaggtgtcttcatctttaattgctgagtctggtgctaagaatgccatagctgacagcaagagacgaatcttagcggcctttcttgtgtgattttcgtgagcgatcgctgcatgatcgaaccgatccgttctgtggataactttgtgagtaaaagagtaaagaggatctattttaataacattacccatcgagagtattattaaaatacatataaatcattgagttaaaataatctacattcacaattatcgtcatgaaatttttatcgtaattgtggatattagttaattgaactttttatatagggaattaatattggtgtattttcctggcggagaatattggatatcaaaattttaaaaacggtggatagcttttcaggccctatggatgtgacgctggtataaattaaaacaccttactgtaaaatgcttaagcgatatttctataatcgatagattggtttttaggaattttcttaaactaattgaatcaattgaatattcaatgaaggaaaatcgtcattttattccagcctagttaattaaacgttgtcactttatattgataatacaaatttattccatgtttatcatagtgtttttttaaggtaataaaccggccgaagccggtttattatcactgaattatcattacttttgtttaatcaaaaagttaacgacatcagaatattgtttagcgtaggcttcttgtgaagaggtatcaataccgtcgtttttgatttggtatttaccattcacgaacatagcaggaacgccgcgtaatccgaggtcttcagccgctttttgttgttgcgcgaccaatgatttaacgacgaagctattgatagcactatcatactcttctgcaggaacaccggctttgataaacacattacgaatatcagatggagtctgaacaacctgagttttctgcacaccttcaaacatcaatggagtaattttatcttctacacccaatgccaaggcaacagcccatgcctgagttaactctttacctagaggccccaaaaagtctacatgataacgagtcattttagtgccttctggcagtgacttcttcactgtttcaggcactttatatatctcttcaaactgatagcaatgtgggcaatagaatgagaagaactccaaaacctgcggctcgcctgttgccggtttatctaaagtcacatattgggaaccatcagaaaattgtgctgctgaggcactaaatgccatcaccatacccactaatgcaagccatactttattcatacaataaaaatctccattatcttaacatcaatacattggaatcagctgtagagggggtgcctgcaacaacttaacctgctctgcaaataccgaagtctgctgtaaccaaaaatcaggctccgccatccacggaaaacttttaggaaaagctggatcttgccaacgtctgacgacccaagccaggtaataaaccatacgcatagcgcgtaaaggttcgatcaacgttaattcccgctgatcaaaatctgcaaattcgccataagcctccagcaatatatccaactgaataagctgctcgctacgttctccatgtaataacatccagagatcctgcactgccgggccattacgcgagtcatccaaatcaacaaaaaatgggccgtcacgccaaagaatattacctgggtgacagtctccatgcagacgaataggctgccagtcagtacgccagtactgtttgatagtatcaataagcaaatctgttgcagctaaaaacttatctttctgcttggttggaaccaactcacagtctgccagcaggcttcgcggttcagtcagatattcttcaacgctcatcgttggtcgggttataaaccggcttttgctaccaacccgatgtattcgcccgagaaagcgcccgacccactctaattgatccagattatcgatctcatactgacgcccgcccacgctggggaatacaacaaagaaaaaaccgcagtgggtatgcaaagtctggccattcagcgctaaaggcgctacggccggaatttctgcttccgctagatcgagagaaaaacggtgctcttcctcaatttgggcggcattccagcgctcaggtcgataaaatttcacgacataacgcttccggtcttcatccataaactgataaacccggttttcatagctgtttaacgccgttaaacctgaatccactcgcaatccgacgccttcaagggcatccatgatcaggtctggagacaatgactgaaaattaaaagcagagttatttagaacagcatttttaggcatcagttattcacggtgatctattgatagcagaagataacatcattcaaaaaacgtcggcattcattgccatgactaatctttaatgatgccacgagcccgtaacaacgccgttttgaaatcttcttcatagtcttttttcaaacctggaatggtttctgtagcggcagaacctcgcatcttcagatgataaatgagaatatcgtccgtcaaatctgaaaaatcgcctttaaaacccgcttctattgccagcttttgcaggaactgaatgagattcagatcgggttcttgttgccaggccggatgtaaaagttcaatcagttcatttacgcgatgacatttcatagaaaaactatcctatttgaaaatatgaagacaaagtagcagggttagccaggtagtgaaagagacctaactgtcaataaaggtaaatccttactccgtcactggtttagttatacaattcctgaatcgcttattgtaataaggtcggccaatgcagccaatgattaccggaataattctcgcaggagggcgctcaactcgaatggggggggaagataagggattgcttcaactgagcggaaaattgctgtaccagcatgtcgcagataaattggctcctcaggttaagcatttactgattaatactaaccgcaatatctcttgctatgagaaatccgggattccagtttttagcgatatcactgacgacttttccggccctttggcgggaatgctagcaggattaaatatagccgcgactgaatggtgcatttttgtgccttgcgatgtcccagatattccatcaaatatggttgagaaactttggcagggccgaaataacacgctggccgcttatgtgaacgatggtgaaagagatcatccaacgctggttttactgcataaaagcctgataacaacattagagaactatctggcaaatggagaaagaaaactaatggtcttactccaaaatattcatgctcaacgggttatatttaatgaatcagcagagatgttttgtaatttaaatacgcctgaagactgtgcgttatgggaagaaaggaatacagaaagacaatgagcaagccaattcccccactcctaggaatagcggcatacagcggcacagggaaaacgacattactgaagcaacttattcccctattacgacagcgtggcgttcgggtagggctaattaagcatactcatcataatatggatgtcgatacgccaggtaaagatagctatgagctacggaaagccggtgcagaccagacattagttgctagtgataaacgttgggcgctaatgactgaaacgccagataatccgtcattggatctccaatatttagcaagccgattggatgcaaacagtatcgatctcgtattggtcgaggggttcaaacatgagcctatcaataagatcgccctatatcgagcggctgtaggaaaaccttttaccggagtaatcgataagcatgttattgcgctagcaagcgatgaaccggcacctacagatttaccgcaattggatattaatcaaccctatcatattgctgatttcatctgttcctggctgaaaagtcagtcttaactgctgctgatagtataaagctggtcacgccattaggttggctcgaagatgatgacttagctgacttttcaacaggacgcttgcgcctgacagcccacactcttgccgctaaaaccacttttcaaacagccacttattcacaccgttaatagcatcttataacaccctgataactgggctaatttggggtagggttgcatcacattgcctaaaacttcggcaaaatcaccctcattgcaagttaacaacacaacaatctagatgataaaaaaggttatttggtatgtagcctgactcgtcagtcaccgccagagttttaaccagcagttaaaaatcttctgtctgttactcttcgcagtgaggccggtagtgtatcagaggcctcagcatcccgactggcgacacgttttatccccttacgccccaccggatgcaagcctggctcttgagctaccgccgagtgtgaatacccgttaatggggatgagtttccgataaaaccgacctggttcgttggttacatggctttttaataaaatataagcccggtgagtgactgtatctgcctgaaaatgctgcgaatttactgcctgaaaacgtcaacggcggcgcaatttaccggataagccgccccctatggaatgaaaatcgccatatacgccttcaacgcccggcattcccgggggttcccatgcccttaaacgcaaaaagccccccgcaatcgcaggaggctcggttcgagggcggcaatgacttttatccgcctcgcgtctgtcttttttccatagcaaaaaccccacgcttttggcatggggtcttggcttgatttgatgcctggcagtgtcctactctcgcatggggagaccccacactaccatcggcgctacggcgtttcacttctgagttcggcatgggatcaggtgggaccaccgcgctattgccgccaggcaaattctgttttaatcaacccgccacgtgatttacatcacacagccagtcaatccaatctgttaacaatgctgaaaatcaaaacgctctctaaaacaccttcggtgttgtaaggttaagcctcacggatcattagtactggttagctcatgcatcgctgcacttacacacccagnnnnnnnnnnnnnnnnnnnnnnnnnnnnnntcttcacacacgcgncatgnctgcatcagncttgcgcccattgtgmaatattcccactgctgccttccgtagaagtctggaccgtgtytcagttccagtgtggctggtcatcctctcagaccagmtagggatcgtcgcctaggtgagccattaccccacctactagctaatcccatctgggcacatccgatggcgtgaggccmtaaggtcccccactttgctcttgcgaggttatgcggtattagctaccgtttccagtagttatccccctccatcaggcagtttcccagacattactcacccgtccgccgctcgccggcaaagtagcaagctactttccgctgccgctcgacttgcatgtgttaggcctgccgccagcgttcaatctgagccatgatcaaactcttcaatttaagatttgtttgatttgctaccgaagtagcgatgctcaaagattactttctgcaaatatgcattcgaaccgaagttcaaatgtttactgctttggtcactcttcaagacttgatatttcttctgcctgccgaaacaggctttgatatcgtcttgcgagtgcccacacagattgtctgataaattgttaaagagcgttcgttacccgttcgcttgcggcgaatcttacggtaacgcgggaggcagataatacgctttcccgctgaagtgtcaagcttttcttttcaactttcgttttaagaaccggcgtttccgcctgcttaacacttcctgacccggcgaagtttgtttcgttgttcccggtcagtggaggcgcattatagggagttcctgacaggctgcaacccctaatttcaaataattttccaaccggctttttttcatcaaaaagtgcggaaatggataacttttctactacttttcagttaaacagccaataccagagtgaaacagtagagtaaaatagaaggataagaagttagccaggacaaatcaccatgcaatttaacgcccaacaacaagccgcccaacgcaacctttcctatttattagctgaaaagattggccagcgtatcctggcgggcgaatatatagccggttctatactgcccggagagatagaactaggcgaacagttcggcgtaagccgcactgcagtacgtgaagcggttaaaatgttagcggcgaaagggatgttgttgccacggccacggattggtacgcgcattatgccgcagtccaactggaattttctcgatcaggagttactcacctggtggatgacccgtgaaaacttcgatcaggtgatgcagcactttattttggtacgaaccgcgttagagccacaggcctgcgctttggccgcggttaacgctaatcctgcgcaaaaacagcaattggctatattgatggcagaaatgcaggcgctgcaccgtgaatttgatcgtgaacgctggattcaggtggatacccaatttcatcaactgatctacgaagccagtggtaatcccttcctgacttcgttcgccaatttgttcagttcggtatatcacagctacttccgtgctattaccggcgatgaagtgataaagctgcaacaccaccaatctatcgttgataccatccttgccagcgacagtcagggtgcctgcattgcctgtcaggtattattacaagacaaaaactgacggagtgtgtaatcacatgttatctatatatagaagagaggattgttaataacgaattccatcaggaaatagaatgattaaatctgctcgtagcatggccggcttaccctggattgccgccatggctttctttatgcaggcgctggacgcaacaatattaaacacagcccttcccgcgatagccgaannnnnnnnnnnnnnnnnnnnnnnnnnnnnnnnnnnnnnnnnnnnnnnnnnnnnnnnnnnnnnnnnnnnnnnnnnnnnnnnnnnnnnnnnnnnnnnnnnnnnnnnnnnnnnnnnnnnnnnnnnnnnnnnnnnnnnnnnnnnnnnnnnnnnnnnnnnnnnnnnnnnnnnnnnnnnnnnnnnnnnnnnnnnnnnnnnnnnnnnnnacgaagggtaatcaggcgcgatcgaccgggaacgccataacctcgctcaatcgctccgctcccagcgccagcatcaccaaacgatcgacacccagcgcaacaccggagcaatcgggcataccgtgctgtaacgctgcgatcagattgacatcgattggattttgcggcaatcccagaacggcgcgtcgacgattatcctgctcgaaacgtttcaactgctcgttggcttcggtcagctcgcggaaaccgttggctaactccatacctttgaagtagacctcgaaacgctcggctacccgatggtcttcggtactgatttcagctagtgacgcttgagaagcagggaaatgatacacaaaggccggtttttcacggccaatttgcggttctacgccaacggtgaacagcagctgtaatagcgtgtcgcggtcatcttccgtatcggcgatattgctcaaatccagcttcgccgccgcttcccgcagctgggttttgtccgctgacagtggatcgacatccaaatgacgcaggaaagcctgctgataagacagcgtttctgcgctgttacaatccagaatctgctgtagcaggtcgtcgacctcattcattaagcgatacatatcataatgaggacgataccactcgagcatggtgaactcgggattatggtgacgaccggcctcttcattgcggaaactacgacccaattgataaatggagccgctgccagccgccagtaggcgcttcatgtgatattccggactggtcatcatgtacagcgtcatgccatcggcagcacccgggccaacaaaccgggtttcaaaaggagacaggtggatatctgtcactgtcgcttggctcatggctggcgtttcaacttccaatacgccgcgatcggcaaagaaccgtcgtatttctgccattattgctgcgcgtttcaacaaattggcgatgggtgcacttggctgccagcttgccgtttcgctcatggtggttaactccgaaatcaaacaggggatgcagtctactcgcatcctatcaggcaaacaaatttgcgacaaagattgcctatttatgccacgaattcagcataacgcgtcgtcaaaaatccttatcaacagcagatcctgtctgcgatcacgtttctgccagttagcccgcgcgcagaggttcaaataaaacaaaacaatcgatcacatcaaatttctactacttatgattaggtatactcattcccatacaaatagtaagaaattgctattcttaatgagttcccccttgcatcgggtaattgattagcaaggcaataatattaaaaaccatattaagaatagacattccttttatatagccgaggtcattgaagttacaggtaggcaactggcaaaccgatcccgatcaactgattcaggtttttgattcggttgagaaagtacagttaacccaccgcagcctcaggtaccaagggtataagaatttcacttgaacaatggagaagcgcagtgcaaacctttaacgccgaccttgccattatcggggccgggggcgctggtttacgtgcagcaatagccgcagcggaagccaacccccaactgaagattgctcttatctcgaaagtttacccaatgcgtagccacaccgtggccgccgaagggggatcagccgcagtcactcaggaccacgattctttcgactaccatttcaacgatacggttgccggcggcgactggctctgtgaacaggatgtcgttgaccactttgttcacagttgcccggaagaaatggcgcagctggaaatctggggatgcccgtggagccgtaaacccgacggttctgtaaacgtgcgccgctttggcggtatgaagattgaacgcacctggtttgccgccgataaaaccggcttccatatgctgcatactctgttccaaacttccctgaaatatccacaaatccaacgctttgatgaacattttgttctcgatattttggtggatgatggacaagcgcgcggcgttgttgcgctgaatatgatggaaggcaccaaaatccagattcgcgccaatgccgttatcatggcgactggcggtgccggacgtgtctatcgctataacaccaacggcggcatcgtcaccggtgatggcatgggcatggctttccaccacggtgttccgctgcgggatatggaatttgtacaatatcacccaaccggcttgcctggctcaggcatcctgatgaccgaaggctgtcgtggcgaaggcggtatcctggtgaataaagatggctaccgctatctacaggactacggcatggggccagaaactccgttgggtaaaccagaaaacaaatatatggagttggggccgcgagataaagtttctcaggctttctggcacgaatggcgcgctggccgcaccattgcgacaccgcgtggcgatgtggtttatctggatttacgtcacctgggtgagaaaaaactgctggaacgcctgccgttcatctgcgagttggccaaagcctatgtgggtgtcgatccggtaaaagatccaatcccagtacgtccaaccgcacattacaccatgggtggcatcgaaaccaatcagcagtgtgaaacccgtattaaagggctatttgccgtcggtgaatgttcttccgttggcctgcatggtgcaaaccgcctcggctctaactcactggccgaactggtggtctttggccgcgtagccggtgaacaagccgcacagcgcgccatggaaagtggcccggcgaacggcaacgcgctggatgcgcaaacccgcgacgtagaggctcgcctggccaacctgatgaaacaggaaggaacggaaaactgggctaaaatccgcgatgaaatgggtctttccatggaagaaggctgtggtatctaccgtacgccagaactcatgcaaaaaaccgtcgataagctggccgagctgaaagagcgctttaaacgcgtgaaaatcaccgataactccagcgtattcaataccgacctgctatacaccatcgaactgggctacggtctggatgtagctgaatgtatggcgcactctgcacttaaccgtaaagagtctcgcggtgcccaccagcgtctggatgaaggctgtaccgaacgcgatgacgtcaacttcctcaaacatactctggccttccacacaccgggcggcacgccgcgcctcgagtatagcgatgtgaaaattaccaaactggcaccggctaaacgtgtctacggcgccgaagccaccgcgcaagataagaagacggcacaagataaaaaggataaggagcaggcgaatggctgatatgaaagtcctgaaaatggagatcatgcgctacaaccctgaacaggatagcgagcctcacttcgacactttcgaagtgccttacgatgagcaaacttcattgctcgatgccttgggttatatcaaggacaatctggcgccagatctgtcttaccgctggtcttgccgtatggcgatctgcggttcgtgcggcatgatggtcaaccgggtacctaaattggcctgtaaaaccttcctgcgggaatataccgagggcatgaaagtcgaagccttaggcaacttcccgatcgaacgcgatctggtcgtggatatgactcactttatcgagagtttggaagccatcaagccttacattatcggcaataaacaagatccaaaagatggcccaacccgccagactccggcacagatggcgaaataccatcagttctccggctgtatcaactgtggtctgtgctacgccgcttgcccgcaattcggtctgaacccagagttcatcggtccggcagcgattacgctggcacaccgttacaatctggatacccgcgatcacggcaagaaacagcgtatgcctcagctcaacggtaacaacggcgtgtggagctgtaccttcgtcggctattgctctgaagtttgtcctaagcacgttgacccagccgccgcgattcagcagggcaaagttgaaagtgcgaaagacttcatgatcgccatgctgaagccacaataagggaggggaaacagcaatgacaactaaacgtaaaccttatgtccgcaccatggccccgaactggtggcagaagctgggtttttaccgcttctatatgctgcgtgaaggcacctccgttccggcggtctggttcagtattaccctgatttacggcgttttcgccctgaaaggtggcccggcaggctgggaaggatttgttagcttcctgcaaaacccgctggtgctattgattaatatcatcacgctattggccgcgctgcttcataccaaaacctggtttgagctggcacctaaggccgccaatatagtggtaaaagacgacaaaatgggaccagagctgatcattaaatcgctttgggtggtgactattgttgcgacagcggtcattttggccgtcgccttaatctaacccggagggaaataagatgaatcaagttcctaagcgctccgatgaaccgattttctggggtctttttggtgctggcggcatgtggggagccattattgcaccagcggttattctgctggttgctattttgctccccctcggcgcatatccaggcgacgctttaagttacgagcgggttttggctttcagccagagcttcatcggccgcgtattcttgctgctgatgattattctgccgctgtggtgtggcctgcatcgtattcaccacgctatgcatgacctgaaaattcatgtgccagccggcaaatgggttttctacggtctggcagccatcctcagcgtagtcgctgctatcggcgttctcactctgtaattctgaacaaaacggcctgccccgcgcgggccgtcttccctttgccccacttgtcatccccctcaaaatttgcatcactgatagatgagagttattttcaataagaacttattactaacaggatgcctcgctatgtctgtcccactgtggtcaaaaataacggtacttatgtctgccctgctctccgtggcttgcagcgtaacgccgccaaaagatgtcaaaattgtcgataactttcagttacctcgctatctgggcacctggtatgagattgcccgtctggatcactcctttgagcgaggtttagagcaggtgacggcgaattattcactacgcggcgatggcgggataaaagtaataaaccgcggctataacccacaaaaacagcgttggcaggaaagtgaaggcaaaggttatttcattggcgaacccaatcgggcggcgctaaaagtctcctttttcggcccattctatggcggttacaacatttttgagttagatgaaaactatggttatgctctggtatgcgggcctaaccgtgattatctgtggattctatcccgtacgccaaacctcagcgccgaagtacgtgaaaaactgctattaacggccaaaggctatggtttcccagtggaaaaactgatctgggtgaagcaggaataagctagaactgagatcgaaaaagggccgaagatcggcccttttctattctgatatttatcaattcgctaacgtttagcttaactagctaatttcaaaccaacaataccagcgacaatcatgcctaagctaagcaaacgtgccgcgctggcggactcaccaagcagcacaatacctaaaatggccgtacctaccgcgccaattcccgtccaaaccgcataggcggttcccgcaggcaggcttttcattgcatgagccaatagcaccacgctcacaaccattgccgccagcgtaataatactgggcgccaaacgagtaaaaccctgagtatattttaagccaatagcccaaataatctctaataatccggcaataaccagaataacccaagccatagtaatcatcctaatgggaggggtcgtccccagatagcagcggttttgccgggtcgtcccgggctgcaaataaaaccgcatttaaattagcacgacgcctaacggccatcaataaggtgggaggaacaatctggtgcccaagaatggctaagggatgctagggaaagatataacaggaatgaccttccgccgttaagatttaataaaaatcattagaagaataaaaaacaaaaaattaatgatttaaaattattaattagctattgaagtacatacaatcaacactaggaataaccttaaattctcgattgagaatagtcctaacattgatatatttcatttccattatcttaatcacaatttattgattgattttaaagaaacacgcaaaagaaaattttattaaattcattatttaacactagttcatggctatttttttgcaaaattcgatcttatatttcaatatttactttagagacaaataattatcccaaattagctcaatcatcgatcgaatataatgtaaaaaacaaaatttgcagtatattaagccgagaattaagccgggcaattaaattcatgatttaacaaatcagggcttcgcctgcttattcccccacgccagtaatatgtggaatttaacaacatcatttttatctcaaggatttgataatgaaaaagttattattaactgctgttattgcagcatctttctctgcggctgttcatgcggcgccacctgctgccggttcccctgggaccatccgttttgaaggcgaaatcgtcaccggcgcctgcggtattgattctaattctttagatcaaaccgttaatttaggtcaggttccttcccatttatttacggcaaaaggcgaccgttcgacggcggctaagttcgatatcgtattgaccgactgcgataccactacgtctaaaaatgccaccgtaacctttaccggtgctggccaccaagaaaatagcgaactgttaggcgttactggtgcagcaactcatgtgggtatccgcctacaggccggcaataatgaatatctggcattaggcaccgccactaaacctattatgttgagcaatggggataaccgactgcaattttcggccatgtatgaagccactgatgcaggcgtaaccgcaggtgacgcagattctacagcgcaatttacggttaattatctctaataatattcaacggctttaatattaagggggaatatattccccctaaacatacagggcaagaattgtgaaaacttatagcttttataagtgggtactctgcgtacctttttttgccttcgaggctgttggcgtagagtttaatactgaatttttaaaaattggtgaacagggtcaggctgacctttcacaattctccgcgcccgatcgattggccccgggaaattatctcgtcgatatagttgtaaataataactactacaagcaacaagaaattaactttgtcgaaaatgcgaaacatccgcaaacacaaccttgtttgcctcgtagtctgattagcacttttggtttaaaacgagaatatatctcgtcgctgcctgaacactcatgcctactgatttacccggtattaccgcacgttattataaaaataacggacagttgaaaattaccgtgccgcaatccctactggaatattatgacaaaaactatactccaccagagcaatgggatagcggtattgccggcctgatgctggattaccgcatcatcggaaatacccgccagaataaacatgaggatagagttaattccctttctgcatttggcacgaccggggctaatttaggtgcctggcgttttcgtggcgactatcagtttgctaattacagtaataaagaaggcaatcaatctttagattttaataacatccatgcctttcgtccgttgccctcaataaaatcgcagctcactttggggcaaacctatttaacctcggatattttcgacacgctcagttacagcggcatcaagctcgccagcgacgagcgtatgctgccgcccagcctgcgcggctacgcgccgcggatcaccggtatcgctaaaacgaatgccaaggtaaccgtcagccagcagggtagaaccatttatttaaccaccgtgccgcccggcccgttcaatattcaggatttgagcagcgcagtacaaggcgagctgcaggtcagcgttgaagaagaagacggttccaccagccaatttaccgtaaataccgcctcagttccctttctaacgcgagagggacaaattcgctataacaccgcgatgggtaaaccgaccaacggcggtaatcacgtacaaaacccattctttaccatgggtgaaatctcctatggcgtcagcagcacctggtctgcctacggcggcactattctggctaacgattaccactctgccgccgttggtctgggtaaagatttatatcaattcggcgcagtttcgctcgatgtgacccaagctcgcgcgactttggaacatcaacaatatcttggtcattcctatcgttttaactatgccaagcgtttcgacagcctcgatgccgatatccgcttctttggctatcgtttttccgataagaaattcatttccctcagcgaatttaccaatgccagcaacggggtattacagcgagataataagcaacgctactcggtagttacggctaaacagttcgatggcttttctacctatctttcttatacccatgatgcgtactggaacgctaaatccagcgaacgtttcgatctttctgccagcacgctattcgacattgagcagtttaaaaatgtctctctcaatatttccctgtcttataacaaagatcaggatcgtaacgatctggtgagttatttggggatcagcatacctctcgaagggcagacccgcgtgagctataaccagcaaactggccgcggtcgctttgaccaaaccgtgtctctgcgacaaaaccgaggtaaggacgattattaccagctaactaccggcggccagcaaaataacgctctggtcagcggcttctatcagcataaatcagatgcctaccagctgggattaagcggcagctatgtgtctgacagctatcattctgctagcgctaatctcagcggttctatggtcagtactttgtacggctccgcgctacattcttccggcagttccggcaacacacgcttattggttgatacccacggtgtttcagatgtgacctttaataacggtaaaaaccacactaattcattcggctattccattatcgatggcgctcctccctatgagaatttcgaggcgcgagtcgatatgaataacctccccgcgaatgccgaagcccatgcgccgatccgcagtctggtgctgactgaaggtgccatcggctacctgccgtttgaaatgaatcagggcagcaagctgttggtattactgaaggattaccaaggtgtttccgtgccgttcggggccgaagtcaccaatacccaaaccggtaaagctaacgccattgtcggcgaagacggcctgacctacctgatcggcgtgaaaccagagagtcagcttaaagttcgctggtcggataaaagctgcaccctcgtcctgccacaggtattgcctgatgccgttacgacgcctcaacccatgagttgccgctaacccttttgttaaaaatgacgcttaggaattgaatatgaagagaacattacatcgctatttcatcaccattctgacgctgctgttatgcggtggactcagctccgctcaggcggctctggtattggatcgcacacggatcatttatcaggaaggcgcgcagtctattagcatcacgttgaccaataaaagcaccttgccttatgtggcgcagtcttggatcgaagatagcgaagggaaaaagatcgcttcgccttttctagcattacctccgctacaacgagtggaacccggcgatcgcaacgtcgttcgtgtcactctcctaccggataacgcgatccctaaagatcgagaatcagttttttatttaaatattcgcgaaataccgccgaaaactgataaaccgaacgcattgcaaattgccctgcattctaaaatcaaattattttaccggcctaccgccgttattcctccgcgtggggaaaataatgccgccaaactggccatcaccacccaaggtaagcagctaaccattaaaaatacgacgccgctgcatgtcaccttggtggccatcgccataggagccggaaagtccccgctggtatttgaaccaaaaatgttatcgccgggagaaagcatcgtagtacccacaaaccatcctgttaacggccggatttatatatctcatatgaatgattatggtggccagcaggataccgcctacgattgttcagcttctgaatgctccagtaacgataagcagaggtcataatgcgacgtttagcctctcttttatgcctgggcatggctttggcctttctgtcacccgcagtttgggccttggcctgcgttcgcaccgatggcagcggtttaatcctgaccgaaagtatcggctcaacggtcaaagtgcccaccactctccccgattacagcgtgatttggcgcggccccacccggagtatttccgctcgctgttatcgcgataacaatattcgcgaaatggagaacatttacttctacgtcaatccgagaaacaccaatccattgaactggggaattgaattcgggatgcgttttaacggcactgaccagtggccgcagggcggtggtaacggtgctggaatcaataccggtagcgtgataccggcctgtaaagcaggaattccgctggcacagtgtcctgatgtcacctttgccgtcacctttcagccgattatccgcaaacgtgggctggatccgttctcaccaacgccggatagcacctatgccctgtaccaactggacggcaaatacggcctaaataacgctcgcgccaactttacctatgttattaccgatttaagtctcataaccgcaaccgattgtaccgtggatgtaaccatcacaccttcccccggcgtcgtcgatttcggcacggtgcagaagactccctccggtttttcaccggcggtaccgcaacagtttttttcactggttctggataaaagcggctgtaaaacaccgattaaaatcaacggctatatcacgactcccaatgcttatggcgactatctgctacccagcgcagacagtggctttggtatcaaactaaccgatctggcaaccaatagtcagattccattggccaaaccgttctttttagcggatttcaccgcgttagatacacagcacgaagtgttactcagcgctgagctggttcctctcggcgagattaaagtcgggccattttctgcgactgcgacggtggaaattctctatctctaaacttcgggacagatgcggttgaacgtccttcatatggatttgtaggggattgaaatgaagaaagtcgttttgattgatccatgccgctttagccgagttggtgttgaatggttaataaactcgcgcatgcatttggcatctaaagttgcactggcgcaaaccagcaatctggtggtcgccaatgcacaaattaaactgtggcaacctcaattggttatcgccgatctttattcttacgtctttgaaacacataaccttaaaattttagagtcacttttggctacctgtatctccagcaagttactggtttatctgcactcccctttgccttggctcagccaatatcttctagatcgtggagcgtggaaagtcatcaccaaaaaacataacatcagtcaattggaacaattagtaagtgctgcattatgcaatccgatgggaaattactctgagcaaccattacaacccgctccggcattatttagtgatagagaggagtcgatattaaattactggctggaaggctgggttgataaaagaatagcaaacacattagatattcatattaaaacagtttatacccacaagcgtaatattcgcctcaaattaggtgcgagcaatcggctttctctttatctggatctatcaacaaatcaaggtcaataactcaaattggcggcagcaacctgatctgttgccgctgattttagtggatacgtgatatggatagatttattcggtgctagcggtgttatcaaatcaggccagatctatctgaatataaagaaaaaccattattattttccacatcactttagcttaacggatgagcagttcataaaaatcatgtcatcaataacccccccatcaaaaaaaaatcactggaattaatatttatagatatttaattattttatgaaatacatcactcatattaagtcgttgcgaaaaccataggtatcagtgattgttacatgaagaaaataaagagttaacgtcctgccagcaatagatgaagaatataccatagagaaaaattggagtattacacataaaaaaggaatgaattatgaaagataacaaaactatagcattcatattattttctattttcatgatattcagtcaattttcttcatttgcccaagcccatggatatattcaatatccagctagtcgagcctatctatgtcaattaggaaataatactcaatgtggctctgtacaatatgaaccgcaaagtgtggagggtataaaaaacttcccagaacatggtcccactgatggagctatcgcgagtgcaggagtcggtatgtttacaccgctggatattcaaacgcccacccgttggtctaagtcaagcatttactctggccccattacattcacttggaatattacggtagaacatagtacaactcgctggcgttattttatgaccaaaccaaattggaatagatcagcaccactctctcgtgcatcatttaatttaataccattttgtcaatataatgattatggaagtattcctgataaatccgttactcatcaatgtgtattacctaacaaccgcacgggttacaacatcatccttggcgtatgggatattgcagatacgaataatgcattctatcaagtaatagatgtcgatataattggttaatgttatcaacaaccagagaaacaaatacacagtggaaaatacagatcggttcccggattagttttgaagtgggaaagataaagaaccccaatattcgaatataactcaattattggggttctttatttattaactgccagagttatctggatcagttaataaatcataactatttcaggcactaattacttaacacgagaaacatattcgccagagcgggtgtcaactttaataacttcaccaacctgtacgaacaatggcactttaaccactgcgccggtgctcagggttgccggcttgccgccggtaccggcagtgtcacctttcagacctggatcggtatcagtgatttccagctctacaaagtttggtggagtcacaacgataggctgaccgttccacagggtaacgatacattcagcctgatcgatcagccatttggcgttttcgcctacggctttaacatctgctgccagctgttcgaaagtttcgttattcatgaaatgccagaactcaccgtcgttgtacaggtaagtcaggttcatatccatgacgtctgcgccttccagagagtcggtagatttaaaggttttttccaactgtttgccagtcagaaggcggcgcattttcacacgcgcaaaagcctggcctttacctggcttcacgaactcacttgattcaacggcgtaaggttcgccttcgaacatgattttaagaccgggacggaaatcgttgctagaataagtcgccataatggccctctgaatattgaaactggtgttaagcccaaaaaatggcaaacattgtaacccgaaacatgccaattagagaagattggttgcagcaactcgccgatgtaattaccgatcctgatgaattactccgacttttagcgctaaatgatcatgccgagctacagcaaggtagggacgcccgtcgcctgtttccgctgcgcgtgccccgcggctttgttgcacggatgcgcagcggcgatgcaaaagatcctttattgctacaagtccttaccgcacgcgaagagttcgtcaccgctcccggttttactaccgacccgctggatgagcaacgcagcgttgttccaggcttgctacacaaataccgcaatcgcgcactgctgctggtaaaaggcggctgcgccgttaactgtcgttactgtttccgccgtcatttcccttatcaggacaatcaaggcaacaaggccaactggcagcaagctttggactatattgctctccaccctgaactggatgagattattttctccggcggcgatccgctgatggccaaagatcacgaactggattggctgatcacccagttagaggccattccgcacctgaaacgcctgcgcattcacactcgtctgccggttgttattcctgcgcgcattacctctaccctatgtcagcggtttgcagattctcgcttacaggtgctgatggtgacgcatatcaatcatccgaatgaaatcgaccaaccgctgcgtgacagcatgacgcgcctcaaacaggccggcgtaactctactgaatcaaagtgtattactacgggatgtaaatgacgatgccgacgtgctggcagcgttaagtaatgcgctgtttgacgcaggaattctgccgtattacatccatgtgctggataaagtgcagggcgctgcgcattttatggtggatgatgatgaagcaagattgctaatgaaagggctacttagtcgggtttctggttatttagtgccaaggctggcgcgggaaattggcggggagccgagtaaaacacctttggatttacgcttgacgcaaagctagcctgcaaaataaatcaggagataccttggcatctcctgatgatttatttcttttcgcttaaactctggcaagcaaaggttatgggcacttataaacctgaccaaccatcttgctgtctaacggagcgaagctggacaagaaggtctcgctcgggctggttgcaccaaaaatcacgttgccgcccatcgctgccgctttgttacgcagatcgttggctgcaccgcgcatagaactgctttcaccgccctggccggataaccagttgctttggctgccgctgacttcgccaactaactggcattcgctaccaggcttagtatcagagaacttaacctgctcgccagccgcagttaactgggtggtagagctacagccagccagcaacattgccgctgaaagaccaagtaatactttaatccgcatttttttccccatcagatattgagaatcacgccaaagtttaccagaaagcaaagtcgccgcttaggcatccgttgccacatttatctgggcaataatagcttacagtttacacgctaactctgcgctgtggctaaaaaaatcccagtgggcatcacacgactgaattaaaccacattttaaattcattaaataaatgtataagcctaaaatccggtaacaagcttatatctacggagaaatacgaatttcatcaatttggcaacaggtgaaggaaaggtgcgggattgttgattatggcaaggttgaccgtgatagcgccggagcagagagggagaaaagaaaaaagcgagcaggtttccccgctcgctttaggtttatagcttattcgcaatcaatgaagctatagggtgtggggcattacatcatgccgcccataccgcccatgccacccatgccacccatgccaccagcgcccatgtcagcgcctttatcgtcgcgtggcaggtcggtgatcatgcactcggtggtgatcatcaggccagcgatagaagctgcgtattgcagagctgaacgggtaactttggttggatccaggatacccattgcgatcatatcgccgtactcttctgagtaagcgttataaccgtagctgccttcgcctgctttcacgttgttcgcgataacagaagcttcttcaccggcgttaaccacgatctgacgcagtggagattccattgcgcgcagcgcaactttgatacccacgttctgatcttcgttgtcgcctttcaggccagagatagcgtgagctgcacgaatcagtgcaacaccaccacccgcgactacgccttcttctaccgcagcacgagttgcgtgcagagcatcttcaacgcgagctttcttctctttcatttcaacttcggttgctgcgccaactttgataaccgcaacgccgccagccagtttagccacgcgttcttgcagtttttctttgtcgtattcagaagttgcttcttcgatctgagcacggatctgagcaacacggccctggatcgcagcttcgtcacctacaccgtcgatgatgatggtggtgtctttgttgatcacaacgcgttttgcctgacccagatcttccagagtggttttttccagttccagaccgatctcttcagaaataacggtacctgaagtcagagtcgcgatgtcttgcagcatagctttacgacggtcgccgaagccaggtgctttaaccgcagccactttcacgatgccacgcatggtgttaactaccaatgttgccagcgcttcgccttcaacatcttcagcgatgatcagcagtggtttaccggctttagcaacggcttccagaactggcagcatttcacggatgttagagattttcttgtcagccagcaggataaatgggctttcaagttcaatagaacctgtttctggtttattgatgaaataaggagacaaatagccacggtcgaactgcataccttctacaacgtccagctcgtcttgcaggcctgagccttcttcaacggtgataacgccttctttaccgactttttccatcgcttctgcaatcagtttacccacggtttcgtcggagtttgcagaaatagtacctacctgagcgatagctttagagtcagagcaaggtacagacagttttttcagttcttcaaccgcagcgataaccgctttgtcgataccgcgcttcagatccatcgggttcatgccagcagcaacagctttcaggccttcagtgatgatggattgagccagtacggttgcagtggtagtaccgtcacccgcagcgtcgttcgctttagaggcaacttcttttaccatctgagcacccatgttctcgaacttgtcttccagctcgatttcacgcgctacagaaacgccgtctttagtaatagttggtgaaccgaaagatttgtccagaacgacgttacgacctttagggcccagggtgactttaactgcgtcagcaaggatgtttacgccgcgaagcattttaatgcgtgcgtcgttaccgaattttacgtctttagctgccattggtattttcctttaaactcgttcagttcagaagatagtgagagcgcgattacgcttcaacaattgccagaatgtcactttcggacatgatcaacacttcatcgttgtcgatcttctctgacttcacgccgtagccatcgttgaaaataaccacgtcacctactttcacatccagtggcttgatttcgccgttatccaggatgcgaccattgccgacggccagaacttcaccacgggtagatttacccgccgcagagcccgtcagaacgatgccgccagcagatttagactcaacttctttgcgcttgacgataacgcgatcatgcaatggacgaattttcattgatagctctcctttgagaaggtccgtatcagatttaggattgataccggtctgccttcataaccagtaccgtgggtttctaagtggggacgtttacccatcccttcaagggataagacaaaaaatttttaatttttttgtcttaaaagggcaaactaagctaactcagccccactgcgaccacggtcatattcaccatgtgattttatttttaaaaaacatagcattataaaatttcgttgcgcttatttatcgtctttgaaacggtcatcgcgagaacgatcgctttcttcgtcacggtgttccacgtggaagcggccatcatccttacgctgaaattcgccgtcaaaggtattcccgtccgccgtcgggccggtgctccttgaacgataaatattcaaatgcggcatcagtttcaaagtcagggacttttgaattggcggcaacagcaataataaaccgaggaaatcggtaaagaagcccggtatcaacagcaagaagccagccagtaccagcgatacacttttcaccatttctgcagcagggctttcacccgcagccagcttttgctgcatttgcataaaagttttcaccccctgattgcgcaccagagacacgcccacgcaggaggtaaaaatcaccagcagtaaagtaaccaacacgcctaaagcggctgccaccttgataaatatcgatatttctatgtaagccaataaaaatatcagcatgaacggtaaccaacgcaccgtattctccttattcagctcatctagcttccgtcgagggccgaatcagggcacttcagacgaaaatcatgagaatgggggcaacgccgccgcggcgcattatgcctactacactaacgtggtggtgcccatgacatttttcaagcagtccactctcttttattaaggttttatctaactgtgagaacaatcacagatatcaaatcctgttgattaattaccaccatatagtgatctgagttcaaggcatttatctataagcagcatatgatcgtggcagcaataagttgaacggttaatccttccgcacttgttgcccacggcgacataaattattcaacaagcaaataattagacagcacaatagagaaggttctcatgtcaaataacattcgtatcgaagaagacctgttaggtacacgagaagtccccgcagaggcttactacggtgttcataccctgcgtgcgattgaaaacttctacatcagcaatagcaaaatcagtgacgtgcctgaatttgtccgcggtatggtgatggtaaaaaaagccgccgcgatggctaacaaagaattacataccatcccgcacaaaattgctgacgtcatcattcgggcgtgtgacgaagttctggataaaggcaaatgcatggaccaattcccggtcgatgtattccagggcggtgcaggtacttcattaaatatgaataccaacgaagttctggccaacattggtctggaactgatggggcatcaaaagggtgaatatcagtacctgaaccctaacgaccatctgaataagtgccagtctaccaacgatgcctaccctaccggttttcgcatcgcggtttacgcatctatcatgaaattgatcgatgccatcaatcagttgggtgaaggcttcggtaaaaaatccaaagaattcgaaaccattctgaaaatgggtcgtacccaattacaggatgctgtacccatgactctgggtcaggaattccgcgcattccaggtattactaaacgaagaaaccaaaaacctgcaacgcaccgccgaactcctgctggaagtgaatctgggcgcgaccgctatcggtaccgcactgaacactcctgaaggttattccgaactggccgtgaagaaattggctgaaatcagtaatctgccggtagttccagccgaagatttgattgaagcgacttctgactgcggcgcttacgtaatggtgcacagcgcgctgaaacgcctggctgttaagatgtcaaaaatctgtaacgacctgcgcttgttgtcttccggcccacgtaccggtttgaatgaaatcaacctgccagaattgcaggcgggttcttctatcatgccagccaaagtgaatccggttattcctgaagttgtgaatcaggtttgctttaaggtgattggaaacgacacttgcgttactatggcggccgaagcgggtcagctccagttgaacgttatggagccggtgattggtcaagcgatgttcgaatctatccacatcctgactaacgcttgctacaatttgctggagaaatgcattaatggcattacggcaaataaagaagtttgcgaaagctacgtatttaattccatcggtatcgtaacttatctgaaccctttcattggccaccataatggtgacatcgttgggaagatctgtgcggaaaccggtaaaaatgtgcgggaagtcgttcttgaacgcggcctgctaactgaagccgagctggatgatatcttctctgttgagaacctgatgcacccagcctacaaagcaaaacgctataccgatgaaaacgaacaataaaataaccatccggtagcccttaaaggcacgctagctcccctggacagcgtgcctttttactttctgacaaacacaactttataactttttattttcatttcattcaaggagtaaacactatgatagccgtagaattagtcattgttctgctggccatttttttaggggccaggctgggcggtatcgggatagggtttgcagggggcattggcgtattggttttagccattattggtgtaaaacccggcagtattccctttgacgttatttcaatcattatggctgtaattgccgctatctctgcaatgcaggtcgcaggcggcatggattatctggtacagcaaactgagaagttgctgcgtaaaaacccaaaacacatcactattctggcgcctctggtcacctattttttgaccatttttgccggtacagggaacatctctctttccgcattaccagtgattgctgaagtggcgaaggagcaaggcataaagccttgccgtccgctgtctacggccgtggtttcagcgcaaatcgccattacagcatctccgatttctgccgccgtggtctatatgtcctcggtaatggaaggccacggagtcagctatttacatctactgatgatcgttattccctccacgctgtgcgccgtattcttaatgtcgctgatcgtgtcatggtgctttaactccaaactgtccgatgaccctgtttatctgaaacgcctcgaagaaggtttggtcacgctgcgcggcgatcaggtcaaagtgatcaagcctcgggccaaaacctcggtattactgttcctgttgggcgttatgtgcgtggtggcttatgccattatcaacagcccaagcgtcggtctggtagaaacgccgctgatgaacaccaccaacgcgattctgattatcatgctgagcgtcgcgacgctgaccacgctggtctgctccgtggatacagatgccattctcaactccagcacgtttaaagccggtatgagcgcctgtatctgtattctgggcgtggcatggctgggcgatacctttgtacagcacaatctggtatggattaaagaaacggcgggtggcctgattcaggctcattcatggttgctggcagtgattttcttcttctgctctgcgctgctgtactctcaagctgcgactgccaaggcactgatgccaatggcgatggcgctgaacgtttctccactggcggcgattgcttctttcgcagcggtttccggcctgttcattttaccaacctacccaacgctggttgcggcggttcaaatggacgataccggcaccacccgcatcggtcgcttcgtctttaaccatccgttctttattcccggcaccatcggggtcgcgctagccgttgtattcggcttcgtgatgggcggtctggttctctagttctccccgagggcgccccgtgcgccctcatcaatcccctcttatcccgctgcattaatctccatattggataaatcatcttcagacccgcccctccttcggggtatagtgcatgactgtcagcttttcctagcgaggttagaatgtctgattctgatgtgattgtcgtactgtgcaccgcacccgatgaagccagtgctcaagatcttgcagggcgagttctgggggaacaactggcggcctgcgctacgctgctgcccggcgcaacgtctctttattactgggaaggacgtttgcagcaggaatacgaagtacaaatgctattcaaaagcaatagcacccatcagcaggcattactgagttttatcaaacaacatcacccttaccagacgccagaattgttggtcttgccggttcgggatggagataaagattacctgtcatggctcaacgcttctttacactgatactgctgctatgcagcgcgctactggcacctcaaagtgctcaggcatctctttttagccaaaacggtcagagccgctttttgccggtcgatcaggcatttgcctttgattttagacaacagggcgagcagctcgatttaagctggcaaattcaccccggctattatttgtatcgccagcagatcaagattgttccgcaacaggcgactcttggcgcggtgaacattcccgcaggccttgctcatagagacgagttctatggcgaagtcgcgattttcaaacagcggctggatttacagatcccgatgattcgggcagagaaaggagccagcgtcagcgtgacctatcaaggctgcgcggatgcgggattctgttatccgccggaaaccagaattgtaccgctgagcgccattgtcgccacaccgcacaccgcagcggaaacgcctgttacgccgccggcacaaaccgaatctgaaccggcctcattgcctttctctccactctgggcactgttgattggcatcggcatcgcttttacgccgtgcgttttgccaatgtatccgttgatttcagccattattcttggaagagaaaaaccccatagccaaggacgaatatttgttttagctatggtttacgtccagggaatggcgctgacttataccttattaggattagtggtggccgctgccgggctacagtttcaggcggcgttacagcatccttacgtgctgattgggctgtcggcgctgtttgtactgctggcgttatcgatgttcggcctgtattccctgcaattaccggcttccctgcaaacccgtttagtcgagtggagcaaccatcaacgcggcggttccctgttcggcgtctttgccatgggagcgctagccggattaatttgctccccctgcaccactgcgcctctcagcgccattttgttgtatatcgctcaaagcggaaacatgctggctggcggcggtacgctttacctgtacgcgctggggatggggattccactgattgcggtcacgctatttggcaaccgcctgctaccgcgcagtgggccgtggatgcaatacgtgaaagaagcgttcggctttgtgattctggcactgccagtcttcctactggaacgcattatcggcgatatttggggcattcgcctgtggagcctgctggcggtggccttcttcggttgggcctttattatcagcttaaaaacgcatcaaggctgggttcgggcgctgcaacttctgctgctggcaggattactgattgcagcccgaccattgcaggattgggcttttggtcacagcgctacgcagcaaacgacgattagccatctcaacttccagcagattaataacctaccggaattacaggaagcgctggcaaaggcgaaaggtaaaccggtgatgttggacttgtacgccgattggtgtgtagcctgtaaagagtttgaaaaatacacctttagcgatcctaaggtgcagtctcaattagccaacacggtgctgctacaggccgatgtgacagccaataatgcggaacacgccgcaatgctgaaagcgctcaaagtgctgggattgccaactatcctgtttttcgacgaacagggaaatgaaatgacgccgtcgcgggtcaccggttatatggatgccgaagcttttttgcatcatttgcagaatagccagcggtaatccacactagcaaaacaccgatgtggaaggagaagcaacgtgcaacgagaagacgttttgagcaacgccctcagcctgttagagcaacgaggcctcgcaacgaccagtctggaaatgctggcagaaaaattatccttgcccgtcagcgaccttcaacgtttttggccagatagggaagcgttgctatacgattgcctgcgctaccacggccagcaaatcgacacttggcgtcggcagctacagctcgacgaaagcctgacgccacagcaaaaactgctggctcgctaccaaacgctgaatgaacaggttcagcaacagcgttatcccggctgcctgtttatcgccgcctgtagcttcttcccagaaaccgaccatcccatccatcaattggcggaacaacagaaacaggcctctctgcaatataccgaagaattactgcatgaaatggatgccgacgacgttgaaatggtggcacagcaaatggagttaattctggaaggctgcctgagcaagctattaatcaaacgtcgaccgcaggatgtggaagtggcaaaacgtctggcggaagacgttctggccgtcgcccagtgccgcaaaaacggcgcgctgagttaagttcagggccagcggctttgcatctatcgcgctcaacccgcattatagtggccctttattttcagtaagactcatagagaattcagaaatggcccaacaaacctctgttgccgaagtgatttattaccacggcgctgtttatactgcggatcgagataatacgatctgtagcgctatcgctatcgggcagggttatatcctggcaactggcagcgatgacgaggtactacgcctcgctactccagaaactcagctaattgatctgcaaggcaagctgatgatgccaggactgattgacagccatatgcacccgttttggggcggcaagcagctacgcggctgccacctgaactatgcggcgctgaccgttgaacagacgctggcgttcatccaacaacatttggatgccgatccaagtcagggggataccgactggctacccgtgcgggcgtggcagcgtcaggccatgattcctgtcggtgcagatatgagccgtgctgcgttggacaccttaaagactcgccgtccggtggtgctgttttccaacgactgccacaccttggccgccaacagccgcgcactggaactgttgggcattgatgaaaataccccaacgccgtccgatggcaaaattgcccgcgatgagcagggaaaactgaccggaattctggaagatgcgcccgcaatgcgcgctttcgacagcattccttccggctcgcctgagcaaaacgtgaataccgccgcctatgtgcaacaggttttaaatgctcagggcgtgacaacggtgatggatacccgcgtatttgccgaacaattatccgcattcggcgcactgcgcgatcgtggcgaactcacgctgcgactgctgggtgcaaaagaagtcactcccgacagcctgaaagggccgcaggatgccggacgagccgttgatgaaattgtcgaatttggtcgccaatggggtgataaaaactggacgccagaaccaggtttggccgttgatcacgttaaattatttatcgatggcgtactccagccgccgacaatgacggcctcgctgctggaaccctatcgtgaaaatcgcggaacagccgagcaaccagactggcagccaaccgaacgttacggtgacctgtactttacggctccggtggtggacgccctgatggtggaatgtgctcgcgccggtatgcatcctcatacccataccgtcggcgacggtgccattgaaatggtactcaacgccgttgagaagatgcgtgaagcttatcctgagaaggatattcgtccgggcctggcacacaacgaattggttgcagcccatcaatacgaacgttttgccaaactgaaagcgacggcggtgctgtcattccaatggtgtggtttgccgggagtgttgatcgacgaagagcgggaaatgctgggagaagcgcgtttccagcatatggaaccgaccgcccgtttcctcgatgcgggcgcgcgtctggcttatggcagcgactggccgattgatcgtctggatgagtggtataaccttcaggtgggaatgactcgtcgcgcgtgggatagtgaaggaaacccggctggcccgcgtttagataacgaccgcgatttgacgttaatcgaagtgctgcgagcggcaactattgacgctgcctatatgattgccaaagaacaatacattggctcattggaagtcggtaaatttgccgatgcaattatttttaaaaataatctgtttgaacaaccggcggaaaccatttatcagaccaaaatcgaaaaaacgctgatcggtgggaaaatcgtttaccaaagttaatctaaccttataaaaaaggggcagtgctgcggcgctgcctttttattttaggccattaccaccctttattgaacattatcactttgtatttcaatagcagaatataaatgccggtcaagttaaccaaaaacaccactttaggatatctattattaacattgattaattttatatattcccaataattagaaagaaataatcgcgttatcgccctcctgcgctaaattaaaattcatcgtatttacccgaaaaaaaccgcggccttggctattattactctccgtactcacgctgagctttccaacccgtaccccctgtgtcaaaatccgctccctttttatatttgaacaccagaacgacggtatccgttgataccaggagatgatagggtaatgccacaaaatattcagttacgcagagttcttaaaacgccagccttggtcgccttcggccttgcttatatggttccgctgggcgtattcaccacttacggtcaggtgacggttctcagtcatggccacttacctatcgcttatctcatcacgatcatcaccattttatttactgctctcagctattgtcgtatgaccagcgcgctcccgctggctggctctgcctattcttacgtacagcgctgttttggcggtaaaaccggttttctggtgggttgggcgcaaatattggattatctgttcctgccgatccttaactatttagttttaggtatatttttacacgaagcattcccggctattcctgcggcagtctttgtcctgggttcgatcgtcagcgtcagcttgctgaatatcctcggcgttcgcttgctaacgtcggttaatttctcgctgatttcggcgcaaatggtctttatcgttctgtttttggcactatcgttcagccaggccgatctcagcccggaagcactgttaaagccgctgttggtgggctcatctgacttttccggtctgttatccggcgcggcggtgctttgtctagccttcctcggttttgatgccatagcgaccatggcggaggaagcgcatgacgccaaacgcacgctgccacgcgctattctgattaccgttatcgcagccggtactatatttatggccgtttcttatgccgctcaccttatctacccagactggaaagcgctgattccggtacaagataccgccagtttggtgatatcggaaaaagtaggcggcaagtggatgtacaccttctttatggcgacctatctgaccggcgtatatgcctctgccatgacggctcagaccggggtttcacgcatcttttacgccatgggtcgtgaaggcgtgctgccacgcaaaatctttttccatcttcacacacgtttccacacgccttatcgagccatcatttttgtcgcgattatctcgctctccgcactgttcctcgatttgagcatggtggtatcaatgattagcttcggcgcactcggcgcatttaccttcgtgaatctcagcgtggtcaaacacttcctgatcaatgagaaacgccgcggcaccagcgccatgattaagtatggcctgctcccgatgatagggtttgtgatgtcggtgtggctttgggtcaatctggagccagacgcactgaaggtaggattgatatggttggtcattgggtttatctatctggtttatctgaccaaaggcctgcgccaggcgccgccttctgtcgatcatgatgacattgctcacctgatagattaagttttcccattgaaccaaacagataggccccgcattgaccgtgttcaagcggggcttatttcgtttatatgactcattctcgctgtggaaaaaaccggaatgttaaccagccgtcgaattacacatactgatgcaccttactttgtcgaagtagacaaactgtatgaaagcgccttcccccgccatgaaaaacgcactcctaaagctaaaaccagcgcgttaaacaacgataattatttgttacttgcctggttcgacggcgaactatttgtaggaatgattggttcatgggcgtttaacggttatacctatattgaacatctggctgtcagtagccagcaacgctcgcagggatacggcaaacgcatacttgagcaatttatacgacagcatccggtgattattctggaggtcgacccactgacgactgaaatcgcccgtaagcgcctgcgcttctatcaaggactcggcttcgtagaaaacagcttcgagcaccgccacccccgctatcatccggatcttgacgatcacgaactggtggtattgagctacccagaaccaatcagccaagctctttataatcaatttaataatgagcttatcaacatcgtaatgggcaacgtgtcgtccctgagattttgagaaactcgcggcactatgtcgctcagcgcccaacaatgagcgataatgcatcaaaaccagctaaaacgctgaaacattaggcaggcaatcaagaagtggaaggatttacattgacgagccaacggtaatcgagtttaatacgccccgttgcccggatagctcagtcggtagagcaggggattgaaaatccccgtgtccttggttcgattccgagtccgggcaccatatttagagaaaccagcctacggctggttttttgctttctggcatctggactcttcatcgaacacgttcgattattcgagccaaaggctctcacccctgcggggccgtcgcaagcgacgttcaaagccgcctagcggcgttgtccgagtccgccaattactctatcgacactgaacctacttcagagtgacccaatagatattggtttttaattcagcagaattaagaactctactatctggaaatacagatactgtaacagcaatatgtagtctatatatttgcatctatgaaaccattaatgccattgataaagcccattcttttctgaacggtattgagttggcgacatattgaaataacttttaaaatcctggcagaaagtactctgactagggaacgccatatcctggctgatttcactcactctcagatttgtctctacccgtttatccgcggataaaataagtcttttccaccgtctatatttggataagctcatgcctatttcgctttggccttcaagtcaaaataagatttagagtatccagccacagcaataacgtccgagactttgattcccagatgaatattgacttatacccaacaaaaaatgtcaggaaaacttttaataaaaaaattttttggcataggtcatatcaagacatgagattccctgttgattaaaagaaaaaccaatatattgtcatgaagcgaaaactctctacttcgtattataaatcgaataaataattatgttagcggtttatcaggcagccttaaataccgcatttactctttcttcccacagcattactaccggtaatacactcaatattttcaataaataaaaaatgttattagctgctatatttaaaaaataaaagtggttatcaataagtgacaataaagttcggtagcctgaatagcaagcctgtctatcaatccaaatgagctactgtttttaactgactctcgttataaatacaaacttcatcgaccagaaaacagtgataagcacatcgctggtaaactctgcaatacggctgttgacgcctcagagctataaaacaaaaaaaccctccagaaataaggagggtcagtggaaatgacggaacgttggaggaaaagcccaagcgcggtatctccgccgtgttttacctgtctgaacgctaaatcgcccctaaattcagatataaaccagcagaaaattgtctctcacgcgtttaacaagctgcttctacggtttctacctctctttgtacataaccaagacggatagcatcaagcgcaatcattttctcttcattagtcggaatcacagcggcgatgactttcgacgccttagtggtaataacctgagtagcaccgcactgtaattgagcattcttcgctgaatcggtctcaaaaccaaaaacggccagatgctccaatgttagctgacggatcaacgccgaattttcacccatgccgccagtcaggattaaagcatcaaaccgccgcagcgaactggcgtgtccgccgatatgtttggcaagccgatgtacaaaaacgtttatcgctaaacgtgcccccgcatgcccttcacgataggctttctctaaaacccgcatgtcgccggataagccagaaatgcccaaaagcccggattccttgtttaatacatgatccaaatccgccatattttgtccggttcgatgcgccagataagctagtgccccgaagtccacatcaccgctacgggttcccataactaaaccttccaacggcgtcattcccattgatgtatctacgcttttaccatcttgaatggcgcaaatagatgcaccattgccgaggtgcgcaataatcagaccatagtcctgcttatcaaatccgagaatatcaacggctttactcgccacatagcgataagacgtgccgtgaaaaccgtagcgtcggacaccttgctcgcgaaaataacggtaaggcagcgcgtaaatatatgcctccggtttcaacgtttggtgaaaacctgtatcaaaaacggccacctgcctgatgcctggaaatagctgacgtgcagcctcaataccatgcaaatttgcgtagttatgtagaggagccagtggtgaaactttttttatctcatcaacgacgcgatcgttaattaacactgattcactgaatatttcaccgccatgggcaacacgatggccgattaagacaatagatttatccagtccgcactttgctaactcatcggaaatagctgtcaacgcatcagcataattgcctttacccagttgaatcttggcgtttttatcaattcttaaaaaagaggcttcggaaccaataccgtctgcaattcctgacgtgatggcttcacaattactcaggttcaggactgaaaatttaatcgatgatgaaccgctgttaataaccagaaccgtagggtttaaagtcatgtcattactccgcccatgtattattgagggcaagttgagggcttttagcgccatacttaaactaatttgtagacgatattaagaatggtcagtagaccgacgagagtgacaaagtagttttctgggcgacctctgaatcgagccagcgctggcagtttatggatggcatacatcggcagcagacacagcaatgaggcgataattggtgcccccatggcttcaatcaaatcgaggatattgggattgatatatgccactatccaggtcgatcccataatgaaaaccatgctgatcagatttaacctaccgctggaaactttggttttatcaccctgataaccaaatttaacaatcaaaccatttaggccttctagcgtgccgagataatgcccaaagaaagatttaaaaatggcaaccagcgcaatcaacgaagcggcatactccagcgtaacggagaaagctgactggcctcccgccatggcggaaaaatggttagcgagataggacagtacgggaatattctgtaccttggcctctgccatattctgaggcgatagcgcaaataagcagctaaaagcaaagaacataacaaccgcgaccattaacatgctggctctgctaataatctgagaacattttttctcagtaaaactacgaccgaattccggctcatattcttcacgttttgatacaacaaaagaagaaacgatcggtgagaagttaaaggaaaacaccatgatggaaatacccagccacaccgttaccagtattccgtcatgtccgaacagagaaatatcattgacacccacctgctcaataaccgaggtattccagtaaggaatcaacgaaactgaaataagtaccaggcaggcaataaatggaaataccaggaaactcatgaccttaaccatgagatctttgccaaagtaaatcactgcggacattaatagcagtaatcctaacgccaccaaacctcggtttagcggaaccaactgaagctgattttcccaaaaggtcataaaggtgttggtaatagtaacgccgtaaatccacagaagtgggcagatagcaaaaaagtaaaggaaggtaataacgacgccgccggttttaccgaagtgctcttcaaccgtttcagtaatatcccctgaacaattttttcctgacaaacacaagcgagccaatgagcggtggcaaagaaaagcgattggataagccaaaagcaacatgattaatattggaataagcccgccaatacctgcacgaatagggaaaaatagaacgcctgcgcctatcgcggtgccaaataatcctaaagtccaggttgtatctgacttacgccacgtttttgttttgactggtgttgatatagcattatcgatatccattaataaattccttattaagatattttacgaaatactgcttaaccccgtaatttgtgatactcgtgataaatcaatgttgccgcctgatataatgctgacggtctttttgccggtgatatagtcttttaactttccgctcagtaatgccgctgatgctaatgcccctgcaccttcggttatgattttgttacgttgaataaggtcgatcatacttcttcttatttcatcttcgctgaccaagacaatgtcattaaccagcgctttgactatttcaaaggttgcattacctgggcgcgcgacatcgcagccatcggccaatgttgaggttttacgatgattggtaatactaccgttataataagaggccgccatgccatgaacgttttccgattgtacgccgataatattaatagtcgggttgactgatttgatcgccaaagcaataccggcaatcaaaccaccaccgccaataggaacaatcacattatcgacatcgtaaagatcttcgagtatttccaaaccaatggtcccttggccggcaatcaccttttcatcatcaaagggatgaatgaaaattctattctccaattcaataatttcactggctttggcgatggtgtcattgaagttctctccgtgcagtatcacctgagcagaatattcactggtcgccgcaatttttgatttcggcgcacaatttggcataacaactttgctgttaatgcctaacatggcgcaagataaagaaacgccttgtgcatggttccctgcggaacaggcaacgacaccctgttttttttcttcttcagtaagtgaactgagtttattaaatgccccgcgaatcttaaatgaaccggtacgctgcatgttttcaaatttgaggtaaatctcaccatggcaacgctcgctaaggtaatttgatctcgccagaccggttttatagatatgcccctttaatcttttttgcgcgctaatcacgtcgttaatcgtcatttttaagtcattgtaaattttcatgtttatagccctgatcaataataattcaaagaataatatatataatagggctggatgctacggcacgaaaaactggattaatgtgacggaaatagcaaaaagaagcggttgatatctaatgaacagtggtttatttcaagaaatgcaacggagtcgacattaagagagaaattagttttatttatctgaaaaggtgaggggaattaaatttcacttaaaaaacgtttataaccaaataaaatagacaggaaagcagcggaagagagccatgaggtaaggaataagaataaatttaatgaaaatcaaagccgtcaggccaaagttttttactatcataatattttatcgctatgcctcactcaatgttaataaatggttgtgtttatgtttaaatataacaaacctacagttttaaccataaagtcggatagataataaaatgtgataacgatcacttcattattcataaaatttttcagtaaaacacatatcgtcacatgtaaaaacaacggaaatagcacggtataaatcaagagcaatactaaaaacatgcctattcgcttttattcattcacttaccaaattacacaacgcttaacttaagataataaatatatcaaaataaaattaatcaccaacaacagataaccaccgcaaaagtaatgtaaattacatttttcacaattaatttaaaaacgctgtaagaataataaaattaaacacattattatcataagcataaatgagcgaaaaacataaaaataaaatacaaataaaagagagaataggcactattaataacgatagaaaccgatgggaaaactaatgcttgtaaacaatacttataaagcaccccaaaactggtcgttgcctaagtcagaagctcttatttcaggaggaaatgcatctgcatcttcaatatctaaatttgatatacccagactagaagaaataaaaacgctttgtgatcaaggctgcataggtatagtgcctgagcatctaattaaattacaggtatttgctcaagaaaataattgtctgataggtatcaggcccgtggatgttatggcaacagacctgatcaaaaatggatacccaaccaagggttttcatattaagggaaaaagtgctaactggggccctcaggctgcatttatctgcgttaagcaggagctgagcaaactggtagataagccagataaaattgcgttatttaatcaacaaattcaagcctgcattgacgaaggccacgcgcaaaaagtaccgctggaaataactgcagcaaggttagatatcttgatgaagagaaatatggttgatattcagatagatgctaatggtttccccattgcgctggatgcccgaacccccagtggaaaactgtataaatttgagctgataccagtaaaagaacatgcggatttatatttagttcaacatcatggagagaccattgaggtgctggcaccgcccggtgaaaataaaaaaccgctgaccgctgattacgatttattgatgattgcaccacacttacaagagtacggggctaaagataatctcctaatcaaagaggtttcccacgatgtattcaaacgaaacatggatgtttataagcgtcgtcgtcatagcgaggtagttaataaatattttcaggcggaatatcttgatcccgctaaattttatgagcgggaagacagcaatattggcaatgtctcaccgcgaatccgcgcaatgataccacttataaataaagctatggtgggcgagggtgaaccggttgtccatcacagcactgacgcaggcagcccggcaagcgacatagcggcaaatttccccgcgaccttcgtgctaccaaagccactaggaaaattgaatgatatttgcgtgataaaaaatatagatgaatttaaggagttgatcatcgccgctaaaaacgaaaactattacattccggtcaatccactatggccaaatgaagtgacaaaaatacgtagcgagagtttttcctccgttattcgacgttttagtcgttaaagtaataaatacggatgatttctaaccttttatatatgacgtctattttccaaggcgaatttttttatttattcgcaggtttttcgcacattaaaagccaccttcaaagaaggtggctaaccgacgatgaaattacttcgctgggcttagggtaaatatttttgggtttcttcctaaccattgagcggctagtgcattgacctgttctggcgtcaccgcttccaactgctctgcctcttgagccagcagggcgaaattgccgtcatcactaccaacctgagccaaggcatcagtccaataactggcactgtttcgcccttcttcctgctcaattcgccaagcttttttggctttactcagctctagcggactgattccttcttctgcaacctgcttcagcactttctgcgccaactgcgccatttcttctgccctttctggcgcagaggtaaagttcaatcgagccaaataataaggcgttggcaacttggctaccatttggctaaagcccagagtataaacgccgctggcctgttcccgcagcgcatagcgcaagcgtagagaaaccactttatccatcagttgtaaggctagctgattcggctgtgaccagaccgcatacgatgagaattgcatactaaccatagtcttaggactactggctaatgggtagtccttcgacattgcacgattcagcggcttaatgcccaaatcacgccaatgtagtcgctgctcggtagcaggaatacttcccatccaacgttccaccagcgtttgcaacttcccttcatccaaagaaccgctaatagttagtgtcatatcctgcgtggcggaaaatagctgacgatggcgttgctctagcccttttatattaaagtcgcgccacggcccgttagctgtcaccaataagcgatccccatgttgatagccttcctgagtcatgctatcgagaaaacggcgctctaccggttgcttatcaatgcccaaagcataggactgcttctgccgctccagcttttcgccggaaaactgaggcgcagtcattttcaagtgcagcaattgcaatagggattccaaatgtgccgctggcgcagagccgcgtaaaccgtggaataacatctcgtcgtaaggcgtcagcgccaaatcctgctgtttactcagttgagccaactggcgcgagctgtattttccgtaaccgctggcttccggtaagcgcatcgcccagctaacctcactgacctcattctcatcttccaacgaacgcccaccgggaatacgtaatgaaatctgcacattatctttcattcccgcgtccgatttaacgatcacccgcattccgttgctcagcgtccacagttgtgtattggcgataggcaaaatctggcgctgtacaaccctcccggccaccggcgtatctagcgttaaagtcaccgctttgggttttagggtgaaagcgcccagctgggtttgacgagttgcgttccacaacgccgcgatagctttactatccacctgttttttatccgtatctggaccaattaaagctaatcgtactgaagcggtatccagcaattccgccacctgcgcctgaacgtgctgcgggccaatcgcggccagccaggtttccgtcattgctagctgctgctgtttatccagcatcggtaaattgagttcaaccgccgtagtaagattatctgcaagataaccaggctgataacggctttcaccggcagcctgctgacgcagtttggttaatatttgctgacgcgctgcattcagttcttctgcactcaccggcgtgctggccatgcgctgtagctcggtaaatagctgtttcagcgttccgttgtaatcactcccctgcgggcgagcgattaataaatgctgaatacgctgattatccagcaaagcgggctgctgattaatgctggcaaccgagagcatctcgttatccaccagcaatgataagcgctggttaaagatggtcagccacaaagtatccagcaaatctcgccactgaccgttagcgctatttaaggaaaccggcaaatcacgctgtaaccccaactgaataatgcgcgagccttgttctgcatcgaataattcactgattaacatgccaggctgaggcgcaaatttcttccaatctggattatcctgagccaacggctgggtagcaggaacggagaataacccagtaatttgtttacgcacttccgtagatttgaagtttccgacaatcaccagagccattcgctgcggctgataccattgttgataataagccacggcttcagataccggagcatgctgtaccacatccagcaaaccaataggatcgcgttgtgcatagcggctaccgtaataccgtagttgctccagtgactggttaatacggaaacccacgccctgacgcaaacgccactcctccacaatcactggccgctctttatcaaaagcttcgggttcaaaactgatacctgtcgcccaatcggacaaaatccgcagcccgagctgaatttgcttttcctctgcgttaggcagagaaagcttgtaagtcgtggcattcagactagtcactgcattaacgtgacttcccaaggtaataccttgtttttctagtgatttaaaactggaagtgccggggaaattacgcgtacctttgaacgccatatgctcgacaaaatgcgctaaaccacgctgtttttcactctcttgcaatgaaccactgttcaccagcagccgcatttccacgcccggctgcgatcgcgctagcaaataaacctgtaggccgttatccagcgtgaagtgctgcacatcactgcgaatcggcaaagactgcccgtcagatagctcggtttcacgggttgtcggcgcgcagcccaacaatacgtagacaagcgacacaagcactagtcggttaaacatggtgtagcaactccttgagaaaaaacagattttacatccaggtacaagcgatggtcggcgagatcggccaggaatgtctggtgacttaccagtaaaatggcgctgtgcggcaacgccgaacgcagcaaccgcagcagatggcgcgcgctggatgcatccagcgccgaggtggtttcatccaacaaaatcaaccttggcttattcaataacaaacgggcaaacatcagccgctgctgttcgccgccggaaaggcgctgttgccacgccgtcgataaggccaattgataaatgaactgcggcaaaccaacctgtgtcaggacgtcccgatactgttcatcgctaaaagcactgcgatccgctggatatgccagtaaatcgtccaatcgctcatgcgccagatataaccgctgcggcagccagctcacgctggcgctgcgggtaatctgcccgcggtaatgtggccaatggccgctgaatgcacgtaataacgtggatttaccaatgccggatcgtccctgaatcagcgtcaggctacctagcgcagcctctacgaggatgcctcgcagcagtgaatttccatcggcagtttgtaaattcaagctggcccgtagcggcatcgcgtcgtccgaagccgtttctaccgggctggacggctccgcttccagcagcaccacaaagttatacaatcgggttacggtggcctgccaggcggcaatgtcccgataggagaaaatgaaccagcctagagcacccgccacctgagcgaatgactgacggatttgcatcaatccgcccaataacagttcaccggcgaggaattttggtaacgcgaaaaaaatcggcgccaatgcgctaagctgctgataaccgacggtgaagaacgataggtttttctcatagcgaatcagctgataccagttatcggcaatggcgtgaaaacgctgtagcaaagccgctcgctcgtgcaattcgccgcgttggccagcaatagcgtcgctggcttcccgtcgggcaatcagcccactgcggtaatcggcctcacgacgctgtttttccatattgagctgacgcagcggatagccgatccagtgggtcaggccaatgccaatcaaggtgtagaaaatacacacccagaacatgtaaccaggaagggtgaaactgtgggacggcagggaaaaattcaggctgccagagagttgccataaaatggcggcgaacgacaccagcgtcagcatggaatgcaggaaggtaatcaacagacgcaggctagattcaatcagcaaacgcacatcctcggcaattcgctggtctgggttatctggctccaatgcgttgattttcagtgcatagtgttgcccgttgcgagaaagccagcgtgccagaatatattcggtcataccgatacgccaacgcatgattagccgttgcttcaaataatccgcaaacaccaccaccagaatcaaagcgctaaccagcacgataaaatgctggagtaactgatagagagcctggctgtttagctgctgtagcgcattgtaaaaatcgccgttccactggttaagacgcacattaaaccaaaccgatgataggctgagcaccagcactatcgccaatagcaaccaggcaaaccatgcggtgccaacgccccaaaaaggcctagcgagataacagaactgttttaacgttttcatcaatcaaccgatcttgtactgacctaaaaaccaaaacgtctggctgcctaagccgcccgactgcgttcagtgacttctcaacataattacaggtcgtaactcagttgcagccagaactggcgccccggttcataggagtgcaacaccttgtcttcatacacaaaagtgtccgccacgttgcgtttgttcagtacgttattcacctcgaccgagatccccgcaccataggcaaaatcaggtttccaggtcactttggtgtcccagcggtaggtgctggcaaagtgggtcttctcgtacttcaacatctgcgaaccggtggtcggatcggtgtaataatcttgctggtagcgtaccgcctgatcccgcgggccacgccattgcagcaggttatagaaggtcaggttgtgttcctgccaatcactggtcagctccagattgaagcgccacggcgagttaaagttggtggagggtaaatcggaagcgttaatcaccttgccgtcgtaccagactttatccgaatccagcttggtgcttgggtcgaagaaagcgtaaccctgatctttcggcgtattgctcttactttgctgccagctcagggaaccggtcatagcatgagacaacgcaccagtttcccacggctgattgttgctcacggaaagtgaaaccgtatcgttgctgctgcggccgccgttatcaaaggtacgaatgcgcgactgcaaactattaccgctgttcggatacttagtacggctgcgtacctcgtcataaccttcgcggtgaacatattgcaaacgccactgggttttcatgatttgctgttgcagagcgaggcttaactcatcgttataaggcgttgaaagtttatcgataccttcgaaatctttcacgtcgccccactcaacctgattgggatcgcggtgacagtcgtagtagcaattctgcataccggcgttttgcgcttcatacagcgcataggtcagcattgaacgaccatagtaacggttagccccagcgatcagcaccgtattaccagttccgaaaatatccaaactgctgctcaaacgcggagcaatattggtctggccgacaaaatcatcccgatccacacgtacgcccggacgcacggtcaaacggccatactgcatgctgtcgtcaaggaacagggcgtagctggtgtaatccgctttataggttcccgcgcgaaagcgggtgatattgctgggctgagcatctgaagtaagccagtctggcgatccgtagaaccgatagcggtagtaatcccgatcccgttgatagcgcgcctcggttttattaacttcaaaaccaacgtttggcgagtggaacatccccagcgcctcaaattgattaaagcgcagcacccctttcgccgtggcactgttttgtcgggtgatcaagtccccctgcccgccattgttgtaataacccgtattcggccagtttgaataatcttccagggcgaagaaatctttcacatcattggtgcgctcatccaccagcttttggtaaccggcggttaaatccaggttggcaaaatcaaagcggtgctctaactgcaacgtcgtgttcaagccattatgatcgttatcgtagcctgaattgattacgctgctggaaaagagcgagctggtataggccgagtaattgccggataaatgcaggctggtacgctcattggcatcccatgagaacttggcgaaatagttatcagacacccgtttctggctgcggtagccgccgtccattgagacgccttccagctcattattcggccctatctgtaaaccgctgccgccgctggtataagtcggaatatccgaaatacgatgcgaggcagaaaagactacgcccagattatcggttatgcccgcttcaaaccaacccccgaagttctgtttactgtatttcggctggaagcgatctggccgactggtgtcattctttgagctgtcaaaagcggtgccgggatcggtaaacaccttgttccacgccgaacgggtttcgcggaaatataaatgtgcgctgttatcaccacgccagcgacggctggtgacatccagcgtaccgccggtaaaaccaccatattccaccggaatgttgttatcgaacacagtcacgctgtcgattaaacggctatcgagataaatcccctgatcgctgctgtcaacgcgggtcgtggtttcaccattgccactgctggccggatcgacgtcgttgttaaagctcacgccatccagtttgtagttgttttggtagctggaagaaccgtggatagaaatcgcactcggcttgatttccccttgattgagactggtgttaccgctgttagaaaactgtaccgccggattggtacgcaataattcggtaatgttaccgttgccggtagtgcgctggcgaatctcttccgaagtaatcacctgcggggctgacatcagattatccgctgcccgaccgctggtttcccccatcacagaggtagtcggaagaataatagcgccggtgttagcacctttcatcgtcggtggacgaataacaaaaccgctaccgctgctaaccaactccaggccgctgcccgccagtaattgctgcaacgcagactgcgggctgtaattaccatgcagagcgggcgctcgcaggttacgcagctcggattcatcgaataacacatgcagttggccttgctgcgccacattggcaatagcgttggctaacggttgctccgccatattgagctgtaaatcggcggcgcctgccccttgactcatcagcagcgttgccagcgccagggcagaaagaacaggcatcccagaaggtttctttttgttgtaagtcatctcgcaatttcttccctagaaaataaaaatgccttgccaatgggcagaggcatcagggaagacgagagaatgagaattatcctcacctatgaaatgaattattttttacttttgctgcgggcgcggcaaaatcaacgcgttaccctgagcgtcctgtacaacattcaccgccaaaagcagcggtaaagcgtttaagaactcatccggattagctaaatccagcgaacctgaaaccggcagcgatgccaagcgcccgtcggtcaactcgatttttcctgaccgatagcgcgccaactctttcagtagctcgcccaatggccgattgcggaatgaaatttgcccactacgccattcgccgacttcattcacctgccgctgacctcgctgtagatcgttttcccctttcagcaagcgcgctgaatctccggcatgcaacatcacggtttccatagatggccgcccggtgaccgctacagtaccttggcgtaccgccacccccatttcatcagcgtcatagcggacgtcaaattcggttcccacgacccgcacctgactttctccggcatagaccaaaaaaggtcgctgcttatttgccgccacctgcaaatacacctcgccatgatccagccagagttggcgttttttcctagcgtagtgaacacgcattttagtatatcgattcaaatgcacgcggctgccgtcggacagcaccacttcacgagcataattatcggtttgcagatgaatatcgtgcatcagcactagcggcaactgactggcaggcaaccacagagcaagcaaaaagaaagccccagcggcacaggcgcgcagcggacgccaccagctcggttttgccttaggctgcgcagcactcgccgggcgcgtaatcagggcacagtccccccagatttgctgcatctgtcgaaaagcctcagcgtgagccgcagagcgctgtaaccattcctgaaattgccgttgttccgcatcgttaaggcgacgcccctggctgcggctaaaccacagcgcagcctgttcgtcgatttctgtttccagaaggcggctagcgtccgtcattgtgctcactctcctgttccgctacgtagcgtttacaatgcaccaaggcaccggcaatgtgcttttctaccatactgacagaaattcccattctctcggccacttcaatttgcgataaaccgtcaaagcggtgcattaaaaaagcctcccgacgacgaggagaaaggctttgcaacgcttcctccagccgatttaaacgctgttggtgttcgaataaacgctgcggttcggtttctgtcggcgcaacttcctctctacctaggctatcttcatgattttcagacaataatagccgctgctttccggtagcacgccaatgatcgataagcacccgatgagcaattttgaacaaaaaggcgcgcgaatgctccaccggtgtttgcctggcacgtttcaaccacagtgtgaatacgtcctgtgacaagtccttggcatcgctggcgttatccactcttttacgaaagaagctaaccaactgaccgtaagtggcctgataggccaaactcaccctgtttgatgggggtttatccatgaatgcatccgttaaagtcgcgcggtccttttgacctgtgccgttcaggccagcataggtattgaagccgtcaggtacatcaatccggttgcccacatctggctgtaaaatagcgttccacaattttctctgctgattcggcggatactcgtaggccccgctcttctgaagctggcggttataagcaaaactcggaataaatgcaaatgataatgcctataactatcaatatgcttattgttacgtataatccgcagcttggctgtcggtgttattgagtgcagggaaagtgataaatatcatcggcacggcatgggcagccatttataaaaagggtttataatcaataaaataacgccgagaatacggcgttcgcggagtcggtaatgaaatcattctacccacagccagcccatagccacggcccaaccactgcagcggctcactttacaccacacacttttggaccgccggaaggcaacccgcgcacccgctggaccgccagtttactgctgggcttagcgctacatttactggccgcagtgttaatgctgggctggtggaatcggctttcacctcagggcgcgttgccaccggcagtaatggtagaaatggcgatttttcagcaagctaaaaccgcgccaactgacgtaccacaaggtgttttgcagcaaatggcggcacctgatgacgttcagccggtcaaaaaggagttgctggagcagccgaagctggcgctttctccccgcggtactcacgcgattcggccggagaaagtcgatagcaagaaaaaaccggtagtaaaaccgaaaccaaccgaaaccccgttgccggtcatagccgaaaataccgcatcaaccaccagcgccccattgcccggttcggccaagaaaaacgccgccaacttttccagcgcttcttccgcggcaatcaacggtaaagccgcatggcaaggggaagtattagcccatatcgatcgctataaacgttatccccgagaagggttacgctatcgtttggaaggggtgagccatgtgcgttttgtggttgatctgaaaggaaaagtgttattagcagagctgatcaccagttccggcgccagaattcttgaccgcgaagctatgacgttgatttcccgcgctcagccaatgcccgcgccaccggcagacattctaaacaacggaactatcgaagtcatcgcccctatcgcctacaacgttaaaggcgcttattagtgagcactgcgcaaggccagaatggtcacgcgcagtagccagtcacctaacaaagccaagggcgtagctacctttgaataagataacgaatggtcggcccatcctgctgaatatccaacactttatagccataattacgtgcatccagcgggatattattgatcgattgtgggcaatcgctgatcacctccagtatttcccctggtttgagctgcggcatggcttccagcgtagcgactgctggatatggacagggctctccgaccatgtctagtcggtaatctggaactatcggttgggtgctcatagtgattccttagataaaattggcgcggcagctttacgactgcggaagaagcgtttttcccaccacaacatggcggcaaaagcgatgcctaataacagataggttatcagcagccctccgattgggccgaaggtgtccagcagattgactttgtcatggtttgtcacgagcactggggcaaaatcatcccagtaatatgccaatagagtggcaccgataacgttgcctaaaccgacccaccagtagtgaatttgcccttctacagcacgatacatccagccggtttcacagccaccagctagcacaatgccgaaaccgaataacaggccaccaatgaccgcatttggccctgcccacaggattttcggcgcaacacccagttgaacatagctaaagataccaatagcgctcaccgccatgccgagaataatggcttttgccatatgggtacggccagtaatccacagatcgcgaaaagccgatgtgaagcaaatctgcgcccgttcgatcaataagccaaaaccaatgccaaatagcatagcaatgccgagtttaggcgcctggaataattcggttaacgcccagcataatgccagcgcgaataccaccatacccagacggaaacggcgctttgcgcgctgaggattttgcgttaacggtgctgctgcgctgactttctgcaatttcaccggaatacggaatattggtaacagcgtaaattttgccccgaaataggagccagccgccgttgcgagggcaaaaaaccaagcgtgtaatgaaaattgaggaataccagtaaaaaatgcagctaaattgcaccccatagccagacgagcgccaaaaccggcaataatcccacctaccagcgcctgagcaattcgaataccgtgttggggcttacgtagcttaatattgttagcccacagcgccgcagcgatacaaccggcaaacatgccgataatcatcattccgtcgatacggtccagcggcgtaccttcgaaacctataactttaaagtagccccactcctgcgggttagcgccgaaccactgcattacatgcccgccccagcgtgtgaactctccggtcacggcccaaaaagtaccggtcaggccaaaatagtaggtcgataagatccctgcggcgatcaccgccggaagcggtgcccaaaatcgcaccaaatattcggatttaaacgactgccaggtcatgcttcctccacgcaatattcatcccccacgcagcgaggtttgttatcgccgatggaataaaaagttaaaaagactcgcaatgataaggcaatttaaacccacagagtatttaatcctgcatagtttgtaaggtttttgtctttcccgccacgcagtggagcagggatctattattgagaaaggaaagttacattggtgcagaacagaaacgtgaacgctaaataatcgggtttatcgaagagaaatagggtagccggtataaaaaacccgcggcgcacattcggcaaaccgcgggcttcgatccagacaggagttaactaaccttggctagctggagtttgttgttccgcgaagaaagatttctcatattctcgggctttcttccgatcaaactggtgttcccacttggcaatcaccaatactgccagtgcgttacccacaacgttcaacgcagttcgcgccatatccagaattcggtcaacaccagcaataaatgccagaccttctaatggaatgcccacgctgcctaaggttgccagcaacaccacaaatgacacgcccggtacccccgcgatgcctttggaagtcaccattaaggtcagcaccagaacgatttcctgaccaatagaaagctcaataccatatagctgcgcgatgaagatcgccgcaatactttggtacaacgtagaaccatccagattaaaggaatagccggttggcaccacaaagctggtaatcgactttggcgcgccgtaggcttccattttctcgatgatacgcggcaaaacggtttctgagctggcagtagaataagccagaatcagctcatctttcagaatgcgaattaacgtccagatccgcagattacaggctctggcaactgcgcccatcacaaccaaggcaaagaaaagaattgcggcgtaaaccaatatcaccagcttggcgagcggaagcaaggcggcaaaaccaaaattcgctacggtcacggaaatcaggccgaatacacctattggggcgtaacgcatgatcatatgtgtgactttaaacatgctctcagaaacggctttgaacacgttaagcagcggctctttggtttcttttggtaaagaagacagccctaaaccaaacagtaccgagaaaaaaataatcggcaacatatcgccattggccatcgaggagaaaacattcgatgggatcagcgatagaatggtactcaccagactatggctaccgctttgtacctgcgccgtggttttttcatactgagaaatatccactgcggttagcgtcgacatatcgatgccatgacccggttggaaaaaattggccaaagtgataccgacaataatcgcgatagtggtgatcacttcaaaataaataatggtcttcaggccaattcgccctaatttctttgcatctccaacgccagcaatacccacaatcagcgttgaaataacaataggaaccacaatcattttaattaagcgaataaaaatatcgccagcagggctgagaatattactgactaaccaatcacgagactcggcctgattatggagaacagcaccaaccagaatacctaatacaagcgcaattaggatttgccaagcaagacttatttttacacttttcatacccaaaaaaatccctcaaagcattccccaaagcgcatgatggacatgcacttcagatggaatacttaatcattaaatacggggctatagttaataaaatccgcggatcggcctcccgccagccgtccaccttttcaatcagtatcatttcaacccgttgttctgcaagccttgtttactctggcttaacccactacgccgagtatcttttggtaggaacaaagagtgataagccataaccaactgttattaaaataataaatttaaaccatagcaaataagcacttcacccttaggtataaaaaataggcgaaattaattagccgataaaatcagcggcttgttgtatttaatgccttattttgttcgcattttgttaaatgggcagtatttcgattttctacctattttaggtattctgcaaccaaagctcccaataaattcattcaaaaatgagaaaaatcatgattaatcgaacaaatctttgctgcataactatgctgttattcttaaactcgttttttatttccattaagaatatctactgactttaaatactattaagtaataataaaaatctaataatcgacttgctctaatcattatcagaattatttttagataaacttcctgccattattgcgaatggattttgtcttaatcgttattcaaacaaagaagtcacctatatacacaatcacggtgtaatacttctttcgctgaaataaatggcacacaggagtatttcatctgatcaaacttcaattctcgattaaatcccttccctattgagatattgatacaccacacagcacatcaagtaagtccctaaaacaacatcttttctgcgtgatctgtcgcccaaaaaagaaacaaaacgacgcccaacactataattaacctttagttgacatattattaacaatctaaaggagaataaatatgagccaactacctaaacacccaattcccgctgcaattgcagaaaatgccctgatcaacccagtccaatatcatgattattatcaacaatctgtacaaaaccccgatgcattctggggcgaacagggcaagattatcgactggataaaaccctatagtattgttaagaacacttcatttgatcctggccacgtcagtattcgttggtttgaggatggtacgctaaatttatccgctaactgtctggatcgccatttggccgagcgcggtgagcaaaccgcaattatttgggaaggtgatgatccaacccaatccaagaacgtcagttataaacagctacaccaagatgtttgccagtttgccaatgtattgaaaaaacttggcgtaaaaaaaggcgacgtagtggctatttatatgccaatggtgccggaagccgcggtagctatgctggcctgtgcgcgtatcggtgccgttcactcggtaattttcggcgggttctcaccggatgcggttgctggtcgtattattgattccaactccaaactggttatcaccgctgacgaaggtatccgcgctggccgcgctattccattgaaaaagaacgttgatgaagcgctaaaaaatccggctatcaccagtatcaataatgtcgtggtcttccaacgtaccggcaaaccgggctactggcaggaaggtcgagatttatggtggcatgacctgattgaaggcgtttcagcggattgtcccgctgaagagatgaatgcagaggatccattattcatcctttatacctctggttctactggtaagcctaaaggcgtactgcacaccaccggtggctatctggtttatgccgccatgaccttcaaatacgtgtttgactatcacccgggcgatatctattggtgtaccgccgatgtgggctgggtcaccggtcacagctatctgctttacggcccgctggcctgcggcgctatcactttgatgtttgaaggcgttcctaattatccaggcgttaaccgcttaggtcaggttatcgataagcatcaggtcaatattttgtacaccgctccaacggcgattcgcgcattgatggccgaaggcgataaagcgattgaaggcaccaagcgcacatcgctgcgtctgatgggttcagttggtgagccaattaaccccgaagcctgggaatggtattacaacaaaattggtaacggtaaatgcccaattgtggatacctggtggcagaccgaaaccggcggtttcatgattacgccactgccaggtgcaaccgagctgaaagccggttcagctacccgtccattcttcggcgtacagccagcgttggtggacaatctggggaatccgcaggaaggtccagccgaaggtaatttggtgattatcgattcatggccgggtcaggcccgtactctgtttggcgatcacgatcgtttcgagcaaacctacttctcaacctttaaaggcatgtatttcagcggagatggcgcccgtcgcgatgaagacggctactactggattactggccgcgtggatgacgttctcaacgtttccggtcaccgcttaggtaccgctgaaatagaatcggcgctggtttctcatccgaaaatcgccgaagcagcggtggttggcgttccccacaatattaaaggtcaggcaatttatgcctatatcacgttgaatcacggagaggagccaacaccggaactttatagcgaagtgcgtaattgggtacgcaaagagattggtccaatcgcgacgccagatattctgcactggacagattcattgccaaaaacccgctctgggaaaattatgcgtcgcatattacgcaaaattgccgcgggcgataccagcaatctaggggatacctcaacgctggccgatccgagcgtagtagaaaaattactggaagaaaaacaatcaatgcaagcaacgtcataaattacaccgccagagagcggcaacttaattaatgcctcacaggagaactctgatgaatgacagcatttatcaagagattgaaaataatcctaaattcaaagagttggtacaaaagcgaggccggtttgcctggctgctatcatcaattaccttagcactctacgttggctttatttttctcattgcctttgaacctcaatggctggggactccgctatatgcaggagccagcatcacgcgcggtattccggtcggcataggtttaatcgtaatttcttttgttcttaccggtatttatgttgtccgcgctaacggtgagttcgaccgcatgacggcagaaattcttcgcgaggtgaagcaatgaagatccgccattggtctgcactttccttactggctctgcctgcgctgtcacaggcagaggcaatcagcggtgaagttcagcgtcaaccgttgaatattcaagctattgtgatgttcttactttttgttggcgctacgttgtatatcacttattgggcttcgaaacgcactcgttcccggcaagattattacaccgctggcggtcgcatcaccggtttccaaaatgggttggctattgccggtgactttatgtcagccgcatcattcctcggtatttccgcactggtttatacctcaggctacgatgggctgatctattccattggttttctgatcggctggccaattattctgttcctgattgccgaacgtctacgtaatcttggtcgctataccttcgccgacgttgcgtcataccgtttgcaacagcgcccaattcgtaccctatcagcctgcggatcgctggttgtggttgccttatacctgattgctcagatggttggtgcaggtaaacttattgagctgctctttggcctgaactaccatgtggccgtagtattagtcggtattctgatggttttatacgtgttatttggcggaatgctggcaaccacttgggtacaaattatcaaggctgtcttgctgctggcgggagcaacattcatggcgttgatggtcatgaaatccgtcggcttcaacttcaatactttgtttagcgaagccatcaaagttcaccctaacggtctcaaaatcatgagccccggaggattggtttcagatcctatatctgcgctatcgctgggtctggctctgatgtttgggacagccggactgccacatattttgatgcgcttctttaccgtaagtgatgcaaaagaagctcgtaaaagcgtgttctacgctactggctttatcggttacttctatattctgacctttattatcggtttcggcgctattttactggttggcccaaacccttcctttaaagatgcggctggcgcactgttaggcggcagcaatatggcggcggttcatcttgctaacgccgttggaggcaatttcttccttggttttatctccgccgtcgctttcgccaccatcctagcggtagttgccggcctaacattagccggcgcctctgcggtttcccatgacttatacgccagcgtaattaagaacggtaaagcgcgagaacgtgatgaattacgcgtctctaaaattaccgtggtggtattagggattgtagcaatcggcttagggattctgtttgagaatcagaatattgccttcatggtaggtctggccttctcaatcgccgccagctgtaacttcccaataatcatcatttcgatgtattgggacaagctgacgacacgaggcgcactagtcggcggctggttaggattgattactgccgtcgtgctgatgatcttgggaccaaccatttgggtcaagattcttggtcacgccgaaccaatctatccatatgaatacccagctttattctcaatgattgtagcctttgtcggcacatggctgttctctatcacggataattcagaaaccggcaagaaagagcgcctgctgttcagagcgcagttcgttcgatcgcaaaccggcctgggcgcctctcaaagcggcggccactaagcattagttttttcaaatatctcaatgtactagaataaaaaccaaggcccttcggggcctttttccatctcattcagtgcgaaaatagcgaaataaaaatcggtcgtgcagagggttagactgatacagataaaatgtagagagaatttataaacgggctgattctacccgacagtaataataaagataaaagcctaaatagccttcagcgcagctgactttttcactgttaagaacgaggtacttttggggagaattacgccacattacctaaaatgtccgcaggataactaactcttcatcaccgctttataatgttaaataaccgagtaatcagcacgatatacgaaggctattgagaataatttatggctcgtgagtggccaatcctgaccgataagtgatgagtgataagtgataagtgataagtgataagtgataagtgataagtgattatcgccggattattggttttcatgataattactttcgaccagcagttaaaaatcttctgtctgttactcttcgcagtgaggccggtagtgtatcagaggcctcagcatcccgactggcgacacgttttatccccttacgccccaccggatgcaagcctggctcttgagctaccgccgagtgtgaatacccattaatgaggatgagtttccgataaaaccgacctggttcgttggttgcatggctttttaataaaatataagcccggtgagtgactgtatctgcctgaaaatgctgcgaatttactgcctgaaaacgtcaacggcggcgcaatttaccggataagccgccccttatggaatgaaaatcgccatatacgccttcaacgcccgacattcccgggggttcccatgcccttaaacgcaaaaagccccccgcaatcgcaggaggctcggttcgagggcggcaatgacttttatccgcctcgcgtctgtcttttttccatagcaaaaaccccacgcttttggcatggggtcttggcttgatttgatgcctggcagtgtccactgtattcgtctcatcttctggatgagactcaccccgctggggccagcgcaggcgcagtttgtcgcatgcatgctcgagtcgcacaccacccaaacgagacaaacaaaaaaggccacccgttagggtagcctcttttgtttatttgatgcctggcagtgtcctactctcgcatggggagaccccacactaccatcggcgctacggcgtttcacttctgagttcggcatgggatcaggtgggaccaccgcgctattgccgccaggcaaattctgtttcaatcaacccgccacgtgatttacaccacacagccagtcaatccaatctgttaacaatgctgaaaatcaaaacgctctctaaaacaccttcggtgttgtaaggttaagcctcacggatcattagtactggttagctcaatgcatcgctgcacttacacacccagcctatcaacgtcatagtctttaacgttccttcagggggcttaaagccccagggaagactcatcttgaggcaagtttcgcgcttagatgctttcagcgcttatcttttccgcatttagctaccgggcaatgccattggcatgacaacccgaacaccagtgatgcgtccactccggtcctctcgtactaggagcagcccctctcaatcttccaacgcccacggcagatagggaccgaactgtctcacgacgttctaaacccagctcgcgtaccactttaaatggcgaacagccatacccttgggacctacttcagccccaggatgtgatgagccgacatcgaggtgccaaacaccgccgtcgatatgaactcttgggcggtatcagcctgttatccccggagtaccttttatccgttgagcgatggcccttccattcagaaccaccggatcactaagacctactttcgtacctgctcgagccgtcactctcgcagtcaagctagcttatgcctttgcactaacctcacgatgtccgaccgtgattagctaaccttcgtgctcctccgttactctttgggaggagaccgccccagtcaaactacccaccagacactgtcctcaccccagattatggggccgagttagaacatcaaacattaaagggtggtatttcaaggttggctccacgcagactggcgtccacgcttcgatgcctcccacctatcctacacatcaaggctcaatgttcagtgtcaagctatagtaaaggttcacggggtctttccgtcttgccgcgggtacactgcatcttcacagcgagttcaatttcactgagtctcgggtggagacagcctggccatcattacgccattcgtgcaggtcggaacttacccgacaaggaatttcgctaccttaggaccgttatagttacggccgccgtttactggggcttcgatcaagagcttcgccttgcggctgaccccatcaattaaccttccagcaccgggcaggcgtcacaccgtatacgtccactttcgtgtttgcacagtgctgtgtttttattaaacagttgcagccagctggtatctgcgactggcttcagctccgagagcaagtctcttcacctagcgccagcgtgccttctcccgaagttacggcaccattttgcctagttccttcacccgagttctctcaagcgcctgagtattctctacctgaccacctgtgtcggtttggggtacgatttaatgttacctgatgcttagaggcttttcctggaagcttggcatcaactacttctgcaccgtagtgcatcgtcatcacgcctcagggttgatggttttccggatttaccaggaatacccccctacacgcttaaaccgggacaaccgtcgcccggctagcctagccttctccgtccccccttcgcagtaacaccaagtacaggaatattaacctgtttcccatcgactacgcttttcagcctcgccttaggggtcgactcaccctgccccgattaacgttggacaggaacccttggtcttccggcgtgcgggtttttcacccgcattatcgttacttatgtcagcattcgcacttctgatacctccagcagtcctcacagactaccttcaacggcttacagaacgctcccctacccaacaacacctaagtgtcgctgccgcagcttcggtgcatggtttagccccgttacatcttccgcgcaggccgactcgaccagtgagctattacgctttctttaaatgatggctgcttctaagccaacatcctggctgtctatgccttcccacatcgtttcccacttaaccatgactttgggacyttagctggcggtctgggttgtttccctcttcacgacggacgttagcacccgccgtgtgtctcccgtgataacattcttcggtattcggagtttgcatcggtttggtaatccgggatggacccctagccgaaacagtgctctacccccgaagatgagttcacgaggcgctacctaaatagctttcggggagaaccagctatctcccggtttgattggcctttcacccccagccacaagtcatccgctaatttttcaacattagtcggttcggtcctccagttagtgttacccaaccttcaacctgcccatggctagatcaccgggtttcgggtctataccttgcaactagacgcccagttaagactcggtttccctacggctcccctatacggttaaccttgctacaaaatataagtcgctgacccattatacaaaaggtacgcagtcacaccacgaaggtgctcccactgcttgtacgtacacggtttcaggttctatttcactcccctcgccggggttcttttcgcctttccctcacggtactggttcactatcggtcagtcaggagtatttagccttggaggatggtccccccatattcagacaggatgtcacgtgtcccgccctactcatcgagttcacagcatgtgcatttttgtgtacgggactatcaccctgtaccgtgcgactttccagacgcttccactaacacacaaactgattcagactctgggctcctccccgttcgctcgccgctactaggggaatctcggttgatttcttttcctcggggtacttagatgtttcagttcccccggttcgcctcgttagactatgtattcatctaacgatagtgcaacgaattgcactgggtttccccattcgggtatcgtcggttgtaacgcttcatatcagcttaccgacgcttttcgcagattagcacgcccttcatcgcctctgactgcctaggcatccaccgtgtacgcttagtcgcttaacctcacaacccgaaggtgtctttcgacatcatcgtgctgcgattattgagagactctacctgcagatgactccttgtctcggtaaatctacggagagacaagttttagctgcagtgtttcaattttcagcttgttccagattgttaaagagcaatatcttaaacacgactcgttaaagtcatctttaagatattcagttgataatgtctttcactcattatcggatggcgtccccaaggggattcgaacccctgttaccgccgtgaaagggcggtgtcctaggcctctagacgatggggacacaggaaattccgactaaatcaaaaacttaatcgtttctcgtgtcatcatgagtcgaaactcacgacatcaacaggtgctcttgctcattactattatcagacaatctgtgtggacactacgcaatgcgtatcattaggtaaggaggtgatccaaccgcaggttcccctacggttaccttgttacgacttcaccccagtcatgaatcacaaagtggtaagcgccctcccgaaggttaagctacctacttcttttgcaacccactcccatggtgtgacgggcggtgtgtacaaggcccgggaacgtattcaccgtagcattctgatctacgattactagcgattccgacttcatggagtcgagttgcagactccaatccggactacgacagactttatgtggtccgcttgctctcgcgagttcgcttcactttgtatctgccattgtagcacgtgtgtagccctactcgtaagggccatgatgacttgacgtcatccccaccttcctccggtttatcaccggcagtctcccttgagttcccaccatgacgtgctggcaacaaaggataagggttgcgctcgttgcgggacttaacccaacatttcacaacacgagctgacgacagccatgcagcacctgtctcacagttcccgaaggcaccgaagcatctctgctacgttctgtggatgtcaagagtaggtaaggttcttcgcgttgcatcgaattaaaccacatgctccaccgcttgtgcgggcccccgtcaattcatttgagttttaaccttgcggccgtactccccaggcggtcgacttaacgcgttagctccggaagccacgcctcaagggcacaacctccaagtcgacatcgtttacagcgtggactaccagggtatctaatcctgtttgctccccacgctttcgcacctgagcgtcagtctttgtccagggggccgccttcgccaccggtattcctccagatctctacgcatttcaccgctacacctggaattctacccccctctacaagactctagcttgccagtttcaaatgcagttcccaagttaagctcggggatttcacatctgacttaacaaaccgcctgcgtgcgctttacgcccagtaattccgattaacgcttgcaccctccgtattaccgcggctgctggcacggagttagccggtgcttcttctgcgagtaacgtcaatcacttcacgtattaggtgaaatgccttcctcctcgctgaaagtgctttacaacccgaaggccttcttcacacacgcggcatggctgcatcaggcttgcgcccattgtgcaatattccccactgctgcctcccgtaggagtctggaccgtgtctcagttccagtgtggctggtcatcctctcagaccagctagggatcgtcgcctaggtgagccattaccccacctactagctaatcccatctgggcacatccgatggcgtgaggccctaaggtcccccactttgctcttgcgaggttatgcggtattagctaccgtttccagtagttatccccctccatcaggcagtttcccagacattactcacccgtccgccgctcgccggcaaagtagcaagctactttccgctgccgctcgacttgcatgtgttaggcctgccgccagcgttcaatctgagccatgatcaaactcttcaatttaagatttgtttgatttgctaccgaagtagcgatgctcaaagattactttctgcaaatatgcattcgaaccgaagttcaaatgtttactgctttggtcactcttcaagacttgatatttcttctgcctgccgaaacaggctttgatatcgtcttgcgagtgcccacacagattgtctgataaattgttaaagagcgttcgttacccgttcgcttgtggcgaatcttacggtaacgcgggaggcagataatacgctttcccgctacagagtcaacaacttaattcgttaattttctctgttctccccggccactctgtgaagttgctcacagcgccgtgtcgatggatgcgcattatagggagctgcttcagaatggcaagggtttatcgtaaagtttattccgtttgctgattatttgcgctttacgcttatttaacccgcattttgatggcttttggtagttctgcgaggctatttagcacccaatcggccagcgcttcacccgcttcagttacgggtttaccgcttctcaccagaactttagtaccgacattggcagccaatgcggcctgcatgtcttcaattttatcacctaccatataagaagcagccatatcgatgttcaattcttgctgtgcttctattaacatgccaggtaacggcttgcgacattcgcaggtttgacgaaactcgtcgacacttccttccggatgatgcggacagaaatagataccatccaaatccacaccgcgatcggccagtgaccaatccatccattctgtcaggctgacaaactgggcttcggtaaacatgccgcgggcgatgccagattggttagtcactagcaccaaggcaaagcccatttcttttaattcacggcaagcatcaatcacaccgtcaataaactgaaagttatctatctcgtggacataaccgtggtcgatattaagagtaccgtcacgatctaaaaatattgcgggaactggctgcgtcacttatatgctcctgaggactgtaaacaccgctagtattgcatgtttcacccatcattgagaatgaagagaaataaccttcccagttgacttggacgtctagacgccttaacatccgatccatgctttggtttcactaaagtttactttttatctagccacggaaactaacgataaaataagaataatatgattaaactctccaatatcagcaaagtgtttcagcagggatcgcgtgttattaccgccctctctgacgtgactcttcacgtccctgccggacagatctatggcgttatcggctcatcaggcgcaggcaaaagcaccctgattcgctgcgccaatatgttagagcgaccaaccagcggtcaggttctggttgatggtcaggatctgacttcattatcagaacgcgaactgactcgcgcacgccgtcagattggcatgattttccagcattttaatttgctctcctcccgtaccgtattcggtaatattgctctgccgcttgagttggataacacgccgcgcgcagatataaagaagagagtgctcgaattacttgatttggtcggtttggctgataaacaggacgcctatccggctaacctttccggcggacaaaaacagcgcgtggctattgcccgagcgcttgccagcaatccgaaagttttattgtgcgacgaagccaccagcgcactggacccagcgacgacccgttctattctggaactgctgaaagacattaaccgtcggctgggattaactatcttgttaatcacccatgaaatggacgtggtaaaacgcatttgcgatcaggttgccgttattagcgaaggcaagctgattgagaaagacagcgtgagcgaagtgttctcccatccgaaaacgccgctggcgcagcagtttattcattccacgctgcatctggatatcccagaagactatgccctacgcatgagcgctgaacctgcgtctgaccgtgtgccattgctgaaactggaatttaccggcaaatccgtagacgctccgctgatttctcaggcagtacgtcgctttaacatcgatatcggtattctgagttcacaaatggattatgccggcggagttaaattcggcgttatgttggcggaattgcacggcgaaagtgaagatggcctggccgcaatcaaattcctgcaagatcatcatgtaaaagtagaggttctgggttatgtctgaggcaatgatgtggttaatgggccggggcatctgggaaacgattgtgatgaccttcgtttccggctttttcggttttgtactgggcctgccaattggcgtgttgctgtatatcacacgtcctgggcaaatcagcgccaacagtaccttatataagacagtctcagcgttggtgaatattttccgctccatacctttcattattttattggtttggatgattccattcactcgcatgatagtaggcacctctatcggcctacaggcggcaatcgttcctttaaccgtaggcgctgcgccatttatcgcgcgtatggtagaaaacgccctactggagattccatctggtttggtagaagcggctcgcgccatgggtgccacgccgttccaaatcatcaaaaaagtattattaccagaagctttgcccggtttagttaacgcggcaaccattacgctgattactctggtcggttattccgccatgggtggcgcagtcggtgccggtggtttaggtcaaatcggataccaatatggttatattgggtatgacgcgaccgcaatgaataccgtcttagtattattggttattttggtctatctgattcagttctgtggtgaccggatcgtcagagccgtgactcacaagtaataatcagcctgcgatagcgctcacagcggcgcctattaaaatgaatgtctatagaggaaaggatatgtcttttaaattaaaatctatcgcggcagtcggcgcgctgatcggaaccctgcttttggccggttgtggtcaggaagaaaaagatactaatcacatcaaagtaggtgtgatcgttggcgctgagcagcaggttgcagaagttgcgcagaaagttgcgaaagataaatacggtctggacgttgagttagttgtattcaacgattatgtgttgcctaacgaagcgttgagcaaaggcgatatcgatctgaatgcttttcagcataaaccttatctggatcagcaaatcattgatcgcggttataaattggtttccgttggtaattccttcgtttaccccattgccggttactccaagaaaatcaaatcactggacgaactgcaaccgggctccagcgtcgcagtacctaacgatccaactaacctaggccgttccctgctgctgctggaaaaacaaaatctgatcaaactgaagccaggcgtaggcttgctgccaacgaagctggatatcatcgaaaaccctaaaaacctgaatctggttgagctggaagcgccccagttaccgcgcgttctggatgaccagaaaattgcgctggcggtgatcaacaccacttatgccagccaggttggtctgactccggcgaaagacggtctgtttgtcgaaggcaaagactcaccttacgttaacctgatcgtggcgcgtgaagacaataaagacgcggaaaacgtgaagaaattcgtacaggcctaccagtctgaagaagtttacgaagccgcgaataaagcctttaacggcggtgctgtaaaaggctggtaatttttcattactgattttagtgaatatatcttcaagacgggctacggcccgtcttgttatttgcatgatagattgcttcaatagcgcaacttaaatataaaaagcaaaggaatctctatgcgtgcgttacctctctgttggttagctctttcgctaactggatgttccatgctgcaaaccgaatcatccaatggcgggaagatgttgccaaacccacagccgacggccaaatccactcaaactacggctccgcgttctgcgccggtgaaactgtataaaaccgccgaagagttggtcggtaaacctttccgtgatttaggggaagtttcaggtgaatcctgccaaaccagcgcgcaagactcaccgccgaatattgccacggcgcgtaagagaatgcagattaaagcctcttacctgaaagcaaacgcggtattgctccatgaatgtcagattatcagcggcgcgccaggttgttaccagcaggcgatttgccaaggttctgcgttgaacgtatcgtcaaaatgaccacgttttcctttgagcagatcggcgttatccggtcgccctataaagaaaaatttgcagttcctcgacagccggggctgattgaagacggcggcggtgagctacaattactggctccttataatcagccagaggcagttcgcggcctgaatgattttagccacctatggataatgtttgttttccatcaaaccatggacggcggttggcgacctactgtgcgtcctccacgccttggcggcaatgctcgtatgggcgtatttgccacccgatcgacttttcgtcccaatcccatcggtatgtcgctcattgagctgaaagccgtgcgagtgaaaggttcggaagtggtgcttgagctagggagtctggatctggtcgacggcacgccggttatcgatattaaaccctacctgccctttgcagaaagccagccgctggctcgtgccggttttgctcaatcagcacctgacaccgatatgccagtaacattttccgcttatgcccaacggcagttagcagaaaatcaggcgcgctacccgaatctagagcgttttatttctcaggttctggcacaggaccctcgtccggcctatcggaaaaatgaagtagaaacgcgggaatacgcagtattattattagagtttaacgttcgttggcgagttattgggcagcaaaccgaagtgttatccctcgacccacgctaaatttcgtgctgttctcttttgacaaccgtttctcactggtaaactaagctacttttactgtttttgactgcctgaccaatctcggcagcctgttgcaatttgcagttctaatggaaccaaaacatcatgcgcactagccaatatttgctctccactctaaaagagacgcctgccgacgcggaagtcattagccatcaattgatgctgcgtgccggcatggttcgtaaactggcctcaggtctttatacctggctgcccaccggtattcgcgttctgaaaaaagttgaaaacatcgttcgtgaagagatgaacaatgcgggcgctattgaagtttccatgccggtagttcagcccgcagacctgtggcaggagagcggtcgttgggagcaatacggccctgaattgctgcgttttgtcgatcgcggcgaacgtccttttgtacttggcccgactcacgaagaagtgattaccgatctggttcgtggcgaaatcaactcttataagcagttgccgctgaacttcttccagattcaaaccaagttccgggacgaagtacgtccgcgctttggcgttatgcgcgcccgcgagtttctcatgaaagatgcttactctttccatacaacgcaggagtctctgcaagaaacttacgatgccatgtatgccgcatacaaccgtatctttgaacgtatggggctgaacttccgcccggttctggctgataccggctctatcggtggcgacgcatcccatgagttccaggttctggccgacagcggtgaagacgatatcgttttctctaccgaatcagactacgcggcgaatatcgaattcgcggaagccatggcgccaaacgaacctcgcgcggccgcgtcggaagaattgcgtgttattgatacgccaaatgcgaaaaccatcgctgaattggtagaccaattccagttacccatcgaaaaaaccgtcaaaaccctgatggttcatgcccatgaagaaagtggccataagctgattgccctgctagtacgtggcgatcacgagctgaacgaaatcaaggcggagaaactaccgcaggttgccaaaccgctgaccttcgcgagcgaagaagaaattcgcgctatcgtaggcgcaggtcctggttctctcggcccggtgaacctgccaatgccagtggttatcgatcgcagcgttgcagttatgagcgatttcggcgctggcgcaaacattgatggcaaacattacttcggtattaactgggagcgcgatctgccgctgccgcagattgctgatctgcgtaacgtggttgaaggcgatatcagcccagacggcaaaggtactttgcagattaaacgcggtatcgaagtgggtcatatcttccagctgggcaccaagtattccgaagcaatgaaagcgacggttcagggtgaagatggccgcaatcaggtcatgaccatgggctgttacggcattggggtttcccgcgtagtggcggcggcgattgagcaaaatcatgatgaccgcgggattatctggccagatgctattgcgccattccaggttgctattctccctatgaatatgcacaagtctttccgcgttaaagagctggcggaagaactgtacgccactctgcgcgctaaaggcatcgatgtcattctggacgaccgtaaagaacgtccgggcgtgatgtttgccgatatggaactgattggcgtgccgcacaatatcgttattggcgatcgcaacttggacagcgaagaagtggaatacaaaaaccgccgtgccagtgagaagaaaatgattaaaaccagcgaaatcattgagttcctgctgagtgaaatcaaaggctaatcagccgagaatggataccaaaaagccctgtttttaacagggctttttctttagctgaatcactgaaaaaccagtgaataatccgtccgcttacgattatttgctattacaggtcttacccgcagtgaacttgatattgccatcaggaatcatggacttatcccactgtccgtcttccatagacggtcgcataccaaaatgtccatttaacgtcaggaaaatcggctcgccggcgtttttccgcgcattcatataaccggtttccaactcgacattattatcaaccgcgaagctatggccggtagcgcagtcggtaaactgtgccgcatcagccatataaatatacatgccacgcaaaggaatagacgtcgttggcaaagcttcgctggccgttaactggtagttcagagaggatgtaatccgttgtccattttgatccaacatttccagattctttcctaccggatggaaatagcgcttctcacctttagcgctggttaacactagcttatcggcggttcgcgcccaggttccctgctctgagaatgtcctatcgccatctctggtatcgcgataagtttcctgcaatacgaaggtgccgtcagcatctaaaaataaagacgtatccagcccactgcaatccgcgcaaggcaatacgccctgataactttgcagcatcggttgtaaaggttgctgttttggctgataaaggtttttacagcccagcagtgacaaagcgccagctgctaataacaaagtaatactgagttttctcacagcttatctcctactgcgtaccaatcctatggacccacacccctgcggtatcaatcctgatgtattttgccgcgcagcgctttagttgcacctttgcggacttttccttccacccgccgaattttagagcctttggtcggcttggttggtcgccgggtcttctctacgaccatggcttggcgaatcagcgccgctaaacgggccagagctgcctcgcgattcatatcctgactgcggtattcctgagccttgataatcaccaccccatccgccgtgaccagatgatgattcagcgccaacaggcgctgcttgtaatactctggcaggctagaggccttgatgtcaaagcgcaaatgtattgccgttgaggatttattaacatgctggccacccgcgccctgagcccggatcgccgttagctctatctcgctgtcggccagcgtcacgctattcgaaatatttaacacacttattgctcgctgccttgccattcagaaaaagtgatttccagattattctgagcatcagaaagccaaatggttccctcttgcagggtcgcctgcaaattcatgttgcgagcggacatcgcagccagtttcgccatttgctcatcatccagaaaacgtacctgaagattttcatggccggaaagtttctctttaacctgcggccaccacactttcgccgcgcgttccccataggaataaagaacaacttttttcgactgattgcaggctttgcgcaagcgcttctcgtccggcagccctaactccacccacagctcgatgccgttatgatcgttacgcagccagatttccggctcatcgtccgcacttaggcctttggtaaataacaaacgctcgtccgcatggcaaatccacgccaatagccgcagcatcatgcgttgatcggtttcggaagggtgctgtgccaccgtcaggttagtatccataaagacattgcgatccatatcggcaatattgactgtggctttgtgaatggttgcttttagtgccatgggtgacctcttgattttcaggaggacagtgtacttgatcccgcctttgcgcgcgctgctaaccccacataaaccgattattaatggcttttagtaagcaaagaaaccttccgctgaacgctgatatctcttcaactcctgtgctatagtccttataagttcagagtttatcttcgtggttttacaatgtggtttaccattgaaaatccaccgggttaaacttttccgggaggataccgtgcaacaatactgtgaattagtacgtcgtttttattccgagattggcagtggcgatcttgggtatgtgcctgatgcgctgggctgtgtattgaaagcattggacgaagttgcggcaaatgacgcactgccgtcctccgttagggaacaggcggcttacgccgccgctaacttattggtgagcgattatgtcgatgagtgaagagtatcaacccatcaattgcgatgattacgataatctggaactcgcctgccagcatcacctgatactgacgttgaagttgagaggcggtgagatcgtagaaggtaaagccagcgacctgctattacgcaagcatgtcgaatacctgattgtggaagaatcggggaaaatgcgcgagttacggctggatcatatcgccagcttcagtcatccagaaattggaactgtcgtggtcagtgcttcgtaatcctttcgccaaaaaaaacgggccgctgaaaagtggcccgttttgtttttaaccaaggcgaaatattagggtttaaggctggcatagtaagccgccaaatcagacatatcctcatcggtcaaacctgaaacataggcgcgcatcacctcagcctgaccgccagaacgcccgccggttttatacgcttttagcgattgctcaagatagagcgcattttgccctgccaaattcggatacatcggcaccgaaaccttaccattcataccgtgacaggcaatacaggcggcagacttcgccttaccggcctcaatatcatttttcgccattgcagaaaaactgcataggctcaacgccactgccagacacacaactgatttcatcattgatcctcaagaccgcttttattattcgttatttattctgttattcagctgacgccactgaacgcaccagcaggctccgccttcttcggctacgccctctggcgtgataaatacgccgatggcggctatcaattgctcaccaaaatacaatagcggaatacgttcgcgctcccaaggcggaatgcctaattcctgccacaattttttagcgcgccgcgaatgccgacgcccaacgattctgatgttcccctgtaggccaaaacggacgctaacaggttcattttcagcgggcactcggattttctgtcccttctcatcagccagttccaaacgtcccagcccggcgggtagctccaacggcgatggcacagaccacggtaaaactgtcgtagtgatggcttccaactgcggtaatacatacaaatattgccgaaaacgccgtacctgatgaggagctaactccagcaccggttctgcatcagcccgcgccaacgccacttcattccaaattcgctgtagctgttctctggcgggcatcgccacgcctttctctgccagccaacgacgcagcaaggcaccgcgtttagcttccgacattagcgctaaaccgttgatcgctaaagaaccatccggttgccgtagttgcgccaagggttcagataatagctcatctaacaattgttcctgctcagcgcacaactccgcactacgcgccaccgatcgggaaaaatgcggccaacgttcggataaaaccggcaatactttcagacgcagaaaattacgatcgaagcgatcgtcctgattgctatcatcttctatccatgccaactggcaatcttcggcgtaacgctctaattgtttgcgagaaatagctaataatgggcgcaaaatctgcccctcagcaaatggcatagccgcagccatcgaagctaaacccgcagggccgctgccgcgttttaacgccagtaaaaaggtttcactttgatcgtcgagatgctgagcagtaagtaaggtttctccttctgccaagtggctggaaaaggcctgataacgcgcggttcgcgcggcggcttctatcccactgtggcgcgtatcgagctgtacccgaacaacttcaaatggcacattccagccctgacactgtgcctggcaatgttccacccagttttccgccagtggattcaaaccatgatgtatatgaatagcgcgcagggttagagacggcaacagactagcgcgcagctgcaccaaagcgtggagcaacacgctggaatctagtccaccgctgaatcccaccagaaaactggtttgcccacgcaggttatcggcaatatattcaacgagttgttgtggctgattcatcgatacatcaccgagacggcttcaattcatacagttccaacggcagcccgtccggatcctgaaagaaagtgaaacgcgattgtgtataaggatcgattcgcaccgtttcacaagccacgcccttctcagccaattgcttaacgctcaaatcaatatcatctacctgaaacgccaggtgacgtaagccacaggcttccgggcggcttggccgcgcagccggagccgggaaggaaaataactcaatgatataattatcgtttaatgccaaatcggctttccaggaatcacgctctgcgcgataaacctcactcagcaaagcgaatcccaatacgtcgcagtagaaatccttgctgacctgataatctgagccgatcaccgcaatatggtgaatctggcgaatgtccaacatggctggctccatcattatttttcacccgctggctaacgggtgatgggttatcaactggttttcagcaccttaaccatatatcgtccatcgtcggccagatgagcgccgtgaatatcggtttcaaagccgggatagtgctcgccgatagcacacagcatcagcaggaaatccaacaccgctcggctttcttcggtaatcatttcacccggcatcaccacgggtacgcccggcggataaggcagaatcatattggcaaccactttgccaatcagatcacccatttcacattcttctatattaccgcggatttgctgttggaacatatcgtaaggcgtcagtttcatttccggcaatacgctaaaggactgatgcattagacgcggcaagtcatggtgacgaataagttgatgtatgccggcggcgagatcctgaattcgcatatgacgataaaaatcaggatcttccgcatacaaatccggcagcatatttttgacacgtaaattcagatcataggcgcgcttaaactccatcagcccacgtaataaactcatggctttggttttatctataccaatactgaacaggaacaataagttatacggcccggttttctcaactataacgccacgctcatcgagaaattttgccactagagcggcaggaataccttcctccgtcaactgcccatcactgttcattcccggcatcagaatcgtgactttaatcgggtccagatacatatgatcagcgtctgccttagcaaagccatgccagttttcgcccggctctagcggccagcactggatgtcttcaatatcatctggctgccagacgtcaaagaaccagttatcgctttcggctctcaagcgcttaacttctttacggaaatgcatcgcgcgctcaatagagcgctgaatcagccgtttgcccggtttacctcgcatcatggcggctgccgtttccattgaggccacgataccgtaatgtggggaagtggtcgtgtgcatcatataggcttcattaaaggtcgattcgttataatcgccttttatatgaatcatcgaagcctgagaaaatgcggccagtaatttatgcgtcgattgggtttcgtaaataactttaccgggaatcctatcgccgctcattccactcttaccatcgtagatctggtgaaattgagtgtaaggcacccaagcagaatcaaaatgtatcgaaggaacgtccagagtctgtttaatataatcggtgttatacaacagaccgtcataggttgagttagtaataaccgcatggacaggccaggtagcccccgccgtttgcgcgatcttttcgttgatgctttcgcgagtaaactctctcttcggtattccgcccaaaataccgtaggcattacgcgcaggccgcaaatatagcggcgtgatatcgctcatcatcaataaatgcgtcagtgacttatgacaattacggtcgatcaatatgctgcaaccggctggggcagaatacatgccgacgattttattggcggtcgacgtaccgttggtcaccatataacttttttcggcgttgaaagtacgcgcgatatactcttcggcttctaaatgcgggccgctatgatccagtaaagaccccagttcggtcaccgaaatagaaatatcggcttttaaggtattggcgccaaagaaatcataaaataggctccccaccgggcttttctgaaatgccgtgcccgccatgtgccctggggtgcaaaacgtatattttccctctttaacatagtgaaacaacgctttggtcagcggcggcgtgatgacatcaatatactcggcggtatactgctcaatatgctgagcaatatcatcggctgcgttaagcgcatattcgaagaaatacagtgccatgcgcatttcattcaggctgacatccagcgatgaggtcgtattgataaaagcataaatcggcaggtattcatttaactcgttgatctcggtacacagcgccatgctgtgctgatcccaatcgaaaatgacgccaataatccgagcgttatgttcaatcagcttgagtagatcctgcccatctttcgggtaaaccagttgaaaacctttagcttgcagagcgctgtgaagctcacgaattggctcatccttatagtaaccccccattgggctcataatggcgatgatattcatttgtatagtcctcacatttttatttatccctataacaacatgaaaactcgccgctgtgtacctaattagataataatgttggaaattctatatcagacaccatgccatatattgactgcattctggacaaaataataaatttaatcaccgagtgaattaatcgggcgagattaaagccacaattaaaactaaaaaagagaacgatcagacaataataattatcaaaacaagcccagccagcaaattaaataacatcaagtaataatcaaaatgtaacttattttaaggcttttaaatttttgatttacatttaacacttcaccatcaaaatataatattttatttcacaggttataaggatggtgttatgcagggaaagtttctctctctattaatcaatacactgtttattattggacttctatttttttatatatccgccagctatgctatttaccccgttaacctggtataccgcgccgacacccgggacttaggggagataaatgcagctaacggaatgcgtccttgggcaggcccacgcgttgattatgatcttatacatcattttgatggagaatctgtcgatgattacaccagtgcctttgtctctaccagcgcttcgtttcgtcatagcatcgagcacgcagcatcacttgccagagccaatagcgaagagccttttgaggaagactttcgaatttttatctatgccataaggccagagtcaaacttctatgaagtcgaaggttctatcgcacatgccagagataccagcgccgaacactcaccacgacaagccggattatcagcgctattgcataattatggcggaatggaggaatgggtggcgctggaaggtatatcggcggagcggatcatttcttttatcgaaataaccggagaaatattgcagaattattatcaatccggtcagctattttcaaatggcttttggataaatcgatggcagccaaatttaggttataactcagccaacgatggtgatatcagtagctcagaattttatacccatattggcaatccgcgaggttatcgtgatgtaatacaaggtgaaacactgcccccattagccgcctcttttacttgtataactcccaactccaattccatgaagaaaaggcagttacaaaataaaagatgtaaaaccagaaaaggcagacatttttatttcgtcaacagacttattgcggcattagagaataacgttgaataaataaacatatctcaatgagatattaacccaccataatataaatgatacacggaggttattttgaataaaccgattattttttctctgtttgtttcattaacgcctattgcctttgccgatgatactcctggctccagttatgtcatcgatgggaccgtcgcggccattcgcgtatcggatcaggggtgtcggatttcatttagtgagagaaccgaaccacgcgaaaatatggtctggcattttagtgacgtaccgataatctgtaatctggctaaaacggcttatgtactgcgggaaaaggtcagagtaaacgtggagataaacccggataaaagttacgttaacactatttctagtattattcttggcgataccaactcaaagtggttacccaataatctctgattgagcggctattattgcccaataaaaaacccggagtcaaagtgagtccgggtttttgtctgaaagattaaatcagcaatagccgtagttcatcaaccgctggtagcggcgattcagcaactcatcgttattcaacacatccagatcgctcagatcggccagcaattgcgctttcagtgaagcggcaatggcctgataatcgcgatgtgcaccgcctaaaggttcaggaatcacggaatcgatcatcttgagctctttcaggcgtggcgcggtaatacccatagcttcggcagctaacggcgctttatccgcacttttccacagaattgacgcacagccttccggcgaaatcaccgagtaagtgctgtactgcaacatattcactttgtcgcctacgccaatcgccaacgcgccaccggagccgccttcaccgataacggtacagacgataggcacattcagacgagacatttcgcgcaggttacgggcaatggcctctgactggccgcgttcttcggcgccaacgccagggtaagcccccggagtatcaatgaaagtaatgatcggcagcttgaagcgctcagccatttccatcaaacgcagcgctttacggtagccttctggagcaggcataccgaagttgcgacgaattttttctttggtttcacggcctttctgatgaccaatgatcatcaccggacggccttccaaacgggcaattccgccgacgatagctttatcatcagcataggcacggtcacctgccagctcttcgaaatccgtaaaaatgttagcgatataatccagggtataaggacgtcgcggatggcgcgctaattgagcgacctgccaagccccgaggtccgaaaaaatcttccgcgtcagctcaacgcttttctcacgcagacgctggacctcttcatccagattaatatctaatttttcgtcttgacggctgactgcagtcagcgagtcaattttcgcttccagctctgcaatcggctgttcaaaatcaagaaaattcagactcatagcattcctattttagtcaaattccagttccacctgctcattaccaaccagcgtccgcaggtcgatcaataaacggtctgtcggggtaacacgccacgtggcaccaaatcgtagtctggcgcgcgcatcttcccgttggtaataaagatgtactgggatcgtccccgatcggtggggttccaacgattggcggagacggttcaaaagctggtcatcaatttgcctgtcagtcagcgagatagcaagcccacgggcatatttttcacgagcttcactgatatccattaactcacgggcggtcattttaagtccaccgctaaagtcatcaaagctgacctgcccactggctatcaggatacggtctttttctaacaaatgctgatatttttccaacgcatccgtgaacatcatcacttccagacgcccggaacggtcatctagcgtacagatgccgatacgatttccgcgttttgttaccatcacgcgcgcagcgattaccagccccactgctgtcgtcattttgccccgatccgtcgggtgcatatctttcaggcgcaacccaccggtataacgctcgatttcctttagatactgggtaatcgggtgaccggttaaatacagccccagcgtctccctctcaccgtcaagaaccacctgttcctgccagcgcggtacgttagcataagattgctcgacctgctcaggcgcatccgccagtacgccgaacatatctgcctgaccaatagcttccgctttggcatgctgatctgccgctttcagcgcttctccgagagagctcatcaaggccgcacgatgcggaccgagacgatcgaaagcgccggacattatcagtttttccagaatccgtcgattcagttttttggtatcaacccgcgcacataaatcgaacagatctttaaagtagccgccttggttgcgggcttccagcatagcttcgattgggccttcgcccacgcctttgatagcgccaatgccgtaaacgatctcgccttcatcgttcacatggaaatgatacagcccgctgtttatatccggcggcaggattttcagccccatgcgccagcactcatccaccaaaccaacgactttctctgtattatccatatcagcggtcattaccgcagccataaattcagccggataatgtgctttcagccacaaagtctgataggaaaccaacgcgtaggcggcagagtgagatttgttaaaaccgtaacccgcaaatttttctaccagatcgaagatcttaatcgccagttcgccgtcaataccctgacttttagctccatcttcaaacacggaacgctgcttggccatttccgccggatttttcttacccattgcgcggcgtagcatatccgccccgccgagggagtagcccgacagcacctgagcgatctgcataacctgttcttggtacaaaataatgccgtaggtaggctctagtaccggtttcagagattcatgctgccattggatatctggataggacaactcttcgcgaccgtgcttacggtcaataaagttatctaccatgcctgattgcaacggtcctgggcggaacagcgccaccaaggcgatcatatcttcgaagcagtcgggtttcaggcgtttaatcagatccttcatcccgcgggattcgagctggaataccgccgtcgtttccgaccgttgcagcatatcaaagctctttttatcctccagcggaatggacgcgatatcgatgggttccagcccggtcttggcgcgacgggcgttgatcatctccagcgcccagttaatgatggttagagtacgcaaaccgaggaagtcaaacttcactaaaccggcatattcgacatcatttttatcgaactgagtaaccgggttattcccctcggcgtcgcaatatagcggcgcaaaatcggtaattttggtcggcgcgataactaccccaccggcgtgtttaccggcgttacgggtaacaccttccaatttacgcgccatatcgatcaaggctcgaacttcttcgtccgcttcgtaaatttcaggtaactgtggctcggcggcgaaggctttttccagcgtcatccccggatcgggcggaatcaatttggaaatacgatcgacaaaaccatagggatggcccagcacccggccaacgtcgcggattaccgctttagcggccatcgtaccgaaggtaataatctgcgaaaccgcgtcacggccatacatttcagcaacgtgctcaatcaccagatcgcgtttttccatacagaaatcgacgtcgaaatcgggcatggatacacgttcagggttcaggaatcgttcaaaaagcagatcaaattccagcggatccagatcggtgattttcagggcataagccaccagagaacctgcacctgaaccacgccccggcccaaccggtacgccgttatctttcgaccactggataaactccatcacgatcaggaagtagcctgggaatcccatctggttgataactttaagctcgatatccagacgttcatcatattcaggccgcttttgcgccctgacttccggatccgggaataaaaattccagacgttcttccagaccctgtttggatttttcgatcagaaaatcttcggtactcatatccccggtcgggaattgaggcaggaaatattcacccagccgaattgtcacgttacaacgtttggcaatttcaacgctgttgatcagcgcttcaggaatatccgcgaacagctcgcacatctgctcttcatcgcgcataaactgctgaggactataattttttggtcgtttcggatcgaccaaagtgaagccatcatgaatcgccacgcgaatttcatgggcatcaaaatccgtttcatcaataaagcgcacatcgttggtggcaaccacgggaataccgcgttcagtcgctaatgctaccgctacgtgcagataattttcttcgtcctgtcgtccagtacggattagctctaaatagtagctaccagggaagtattcattgtaaaaatcaagacattgatcgacctgagcctgattgccacgcagcaaaaatttgcctacgtcgcccatacgtccgccggacaacaaaatcagcccttcgcggtgcttaatcagccagtcacgatcgataaccggccctgcggggccatagccacgctgataagcctcggaaataagcagggtaaggttttgatagccttcgttgttacgcgccagaatagtcagatgcgcaaactcatcgcccagcatctcgctctgcacacagaaatcagcgccaatgataggtttgattcccgcgccgtgagcgctgccgtaaaacttcaccaaaccgcacaggttggtaaagtcagtaatcgctaacgctggcatgcctaaggcggcagcccgcttcaccaagggtccaatcttggctaatccatcgatcatggaataatcgctgtgaacacgcaggtggacaaaacgaggttcggccatatccagataccagaaattagtggattgaatcacacccgcaggactgggtgtctcggggcatcataactataacctgtatcacgcaaaccattgtatggatgcaattcgatattcactggctatacgttgtttccatcaggcagtagcaatgcgggcctatgccagcccgagcacgcgtttaaccggagcaaaactgcgacgatggtgatctgtggcacccaatgcggccaaccgctctagatggaatgcggtcggatagcctttatgctgagcaaagccgtaatccggaaactcggcatccagcaacgccatttcccgatcgcgggtcacttttgcgacgatagacgcagcgctaatctcagccactcggctatcccctttcaccaccgcgagggacggcatcggcagtgccggacaacggttaccgtcgattaagacataatcaggcgcaatatgcagcccggcaaccgctctctgcatcgccagcatggtagcgtgcaatatattcatatcgtcaatttcttccggctctgcgcgccccagactccaagacagcgccttctcggtaatctcgtcataaagcgccaatctgcgcttttcactgagtttctttgagtctgccagcccgataatgggttgattcgggtcgaggatcactgcggcggtcacgaccgcgccaaccagcggcccgcgcccgacctcatcaacgccggcaatgagatttgcctgcggataaataaaaatatcgctcattgcttcgctaattccaataccgcctgtgcggcctgtttgtccgcatcgcagcgaatgctttggtgcaaggccagaaaacgtgtttttagtgcttcaaccgcctcgccacccttcaataaaggtaataaagcgtctgccaatttttgcggctgacactcttgctgtagcaattcgggaaccagttcttcgcccgccagtaagttaggtaatgagacataaggcgttttcaccaaacgctccgccaaccagaaggtgaaaggcttcatacggtaacccacaaccatcggcgatttggccaacatgcattccagcgcggcggtgcccgaagccaacagagtggcatcgctggcgaccattgcagctctggctttaccatccaataaatggacggataattccggtgcaacttcggcttttatacgttcgaactgttcccgacgcttgctgttcaccagcggcaccaatacttctaaatcagggaattgctgccgtaatatctcggcggtgcgtagaaagtcggcacttaacatttcgacttctgaatgccgactccccggcaataacgccagacagtggacatcagtagcgatacctaattcagcacgagccgccgcacgattggcaaccaacggcatggcatccgccatggtgtgaccaataaaacgacagggaacgttgaaacgatcgtaaaacgctttttcgaaaggcagaaaagccaaaaccatatctgtggctttaccgattttgaaaacgcgcttatgacgccaggcccaaaccgagggactgacgtaatgaatagtgcgaattccgttctgctttaagcggccttccagggtgatgttaaaatcgggagcatcgatacccacgaatacatcgggagaaagctcgctgaaacggcgcgtcaaatccttacggattttaagaagacgcggtaaccgttccagcacctccacaacccccatcacagccaactcttccatttcgtaccaggcttcacaaccctcggcttgcattaaggggccggcaacgccgacaaagcgggcattgggaacctgagctttaagcgcccggattaaccctgcacctaaaatatcgccggaggtttctccggcaactaacccaatagttaatgggcgatcggctgtcatgacaggctcttgcataagttagcggataataccgcgggtcgaacgagcgaagaaatcgctgaacggcttaaccgcaggatgctgctcggccaattcggcaatttccggcttcacttcatccaaagtacgtccgctgcgatacacaagcttgtaagcattacggatagcatgcagagattctttatcaaaaccacggcgtttcagcccttcgatattaataccgaacggtgtcgcgtggtttccttgcgctatgacaaaaggaggcacatcctgcgcaaccccggaacagccgccaaccattacatgtgcaccgatcacacagaattgatgaacagcggtcattccgccaataatggcataatcatccacttcaacgtggccacccaaagtcgcgttattggcaaagatgcagcggttgccgataatgcagtcatgagcgatatgggcattaatcatcagtaggttatcgctaccaactttcgtcaccccggtaccttgtaccgtgccacggtggatagtcacactttcacggatacggttacgatcgccaatttccacccgtgtcggttcgccggcatatttcagatcctggttagcttcaccaatggaagcaaactggtaaatctcattatcgcggccgattttagtcacgccgttcacgacaatatgggatttcagtactgtgccttcaccaatttccacctgggaaccgatatagcaaaatgggccaatgtgaacattagcaccaatcacagcaccttcttcaacgatagcactcgggtggataaaggcggttttgtcaatcacgtatcaagactccttagatgcgggtactgctgctggtgccggtttgctgcgtgcgcacatcatggtggcagtacagacaatttcaccgtcaactttagcaacaccggtaaagcgggttaaaccacgacgctctttgacgaattcaacttccataatcatctgatcgccaggcactaccgggcgtttaaagcgggcttcatcaataccagcaaagtagtaaagttcgcctggttcaagtttaccgcggcttttaaatgccaaaataccggtagcctgcgccattgcttccaaaatcagtacgccagggaaaataggcttaccggggaaatggccttggaaaaaaggctcgttgaaagagacgttcttcactgcacgtagaaatttcccttcctcaaaatccaggacgcgatctaccagcaaaaaaggaaaacggtgcggcagtagatctaaaatctcttcaatatgcagagtatgagtgtcagtagtcaaaatactcttcctgtctaaaaaattaatgctatcaacgacacggcctgctttgaccccaaaaggagatcattaggcaggccgcaaattaggaactctgtacgcttcgggcagtaagcgccaatagcttttgttattggctcagagtggtaattactctttatcgattttacgttcgacagctttcaaacgcttattcatctcatcgatattcatcaccagtgctgcggtttttcgccacgttttatttggctgcaacggaattccggaggagtataccccaggttcagtgattggacgcatcaccattcccattccggtcacaacaaccttgtcggcaatctccatgtgaccattgatcacactggcaccaccgatctggcaatatcggccaactttcaggcttcccgccatgataacgccgcccgcaactgcggtattgtcgccaatagtcacgttatgcgcaatctggcattgattatcaatgatgacaccattaccgataaccgtgttatctaacgcgccgcggtcgatagttgtacaggcaccaatctccacgcggtcaccaattattacggtgccaagctgcgggattttgatccaattgccacgatcgttagcgtaaccaaaaccatctgcaccaatgaccgtaccggattgaatcaggcaatgctgcccaatctcaacttcatgataaacggaaacattggcccacaaacggctacctgcaccgatacgtgcatttttaccgacaaaacagcccgcaccgataaccacgttatcacccagaacaacgccggactcaatcaccgcatttgcgccaattgatacctgattgcccaaggttgcttcaggggaaatcactgcgcttggggcgatgtcctgagctggctgcggagtggtatccataatctgcgccatgcgcgcataggtcagatagggatttttaacgactaaagcagcaacgttacaataaggcagatcttcctcggtcaaaaccacggcgctagcttggcaagacgcgagttgttcccggtaacggctgtttgacaaaaacgtgatttgcgcaggtttggcagaatgcattgaagcgatgccggtgatgacaatttcgccatcaccgtgcacttgtgcatccaactgctgggctaaatcagccagtcgaattgaaggcatgtgttatttaacctgtttcagcacgtcagcagtgatgtcttttgaggaatcagcgtatgccacagcattcgcgtcgataaccacatcatacccacctttacttgcaacagatttcacagcgtcctgaatacggctcaggattttgttacgctcttccatctggcgacgacggttgtcttgttcaaacgcctgcgctttttgagagaaggtttcacgctgcgccatgacgtctttttccagtttggtacgatcgctggctttcatggtagaaccgtcgcgctgcagcttctgcattttggtctgcagatcgcgctccattccttgcagctcggttgcacggcctttgaattcattctccagctgcttagccacggtttcacgcgcgggtaattgttggaaaatgctggaaacattaacaatagcaatcttgtcagcggcttgaacgctggctgaagcagccaatgctaaaccaagacctgcggcacacaaccactttttcactataaactccttaccattacccgtttgtgtcagagacaccctgaaatgcacttgacgccggatttatccgatgcggcaaaggtaatactagatcacctttgcaacagggagatcggcgtcagcgcgatctttacttatcgatcaacaattcttgctcaactactcagtagcctgttaccaggttttaccgatgttaaactggaactgctcggatttatcacccggatagtctttgaccggtttggcgtaagagaacaccaatggacccagcggtgacatccactgtaatgctacacccgcagaaacgcgaatattgcttgggtcgctgtagtcaggaatcccggcggctcccgttgccgcagtgttttcccagtgggtatcccaaacggtacctgaatcgataaagatcgaagtacgaaccgagttagaatacttttcactgataaacggcgttggcgtgatcaattcgatactcgccacagccatggcattaccgcccacagcatcggtagatttattaaccgtagcgccattattcgcatagtatgcagctttaggcccgatgttgttcgagcggaaaccacgtacagtgctggaaccaccggcatagaagttctcatagaacggcatttctttgccaccgaggccatcgccataacctaagcgcccgcgacctaacagaacccaagaacgatcctgatccaacggcaggtagccggaagtatcgaaggtcactttgtagaattcattatcggagccaggaacggttactttaccgttaaccgaagattttacaccggaagtcgggaagaaacctcggtctaggttgttataagtccaaccaaggttcagggtaaagtcatcagcggtgaagtcagcgcggtcagtatagttcggcttttggccgactgactcgagataacgccacatagcaacctgcggcaacatgtcggacagactgttgtgcacatagcccacgcctacgcgtaatgagttattttcgttgattgggaacccaagggtaccgtcaacaccgtagctgctgttggtatagccagacaggtctgcgttatccgctttaaaatcgttgtagaacacacgaccacccagactcacaccgtcaacggtgaagtaagggtcggttaacgtaaattcagcataggtctggtaatcattcttagtaccgttaatccctacgctgttacccgtgcccagccagttatcctgttgaacacccacctggaaactcacgccactttcagtaccgtagccaatgccgaagttcaggctaccggtattacgttctttaactttgtaaacaatatcaacctgatcggcagtacccggaacacgctgcgtttccacatcgacggtttcgaagtaacctaaacggttcagacgatctttaccttgttcaacctgagcgttacccagccatgcaccttccatctgacgcatttcacgacgaagaacggaatctttactggtgtcattgccttcgaagcgaacgtgacgcacatagaaacggttacccgcatccacattaatgtgcagtttcacggttttatccgcatcgttgatttcaggctgagtctgtacgcgtgggtaagcgtagccatagcgacctaacatctttttgatgtcgtcttccatgcgcgtcactttaccgccgttatacaactcgcccggctcaattttggtcagcttctcagcttcagactgatggcccgccagattcccgttgaccaccacgctgctcaacttgtactgctcgccttctgtcaggttgattgtgatgtagatgccttttttatccggcgtcaaactcacctgagtagaatcgatgttgaagcgtgcgtaaccgcgatccagatagaagctacgcaggatctcaagatcgcctgccagtttctgtttctgatatttacggtcaccaaccacgttccaccaaggcacttcatcgcgcagctggaaacgtgaaatcagttcgtctgtgctaaacgcatggttaccgacgatattgatctgctgaatcttggcagatacaccttcggtaaacaccagcttcagatcgacacggttgcgcggcaacggcgtcactacggctttcaccgaagcgctgtatttacccacgctgtaatagaagtcctccagacctttttcaatgctggagatcgttgtgcggtctagtgcctcgccaacccgaacgccagaggcttcaaggttctgtttaagcatatcctctttcaccgctttgttaccggagaaagtgatactggcgatcgttgggcgttctttgacttgaacaatcagagtattaccatcgcgcagaacgcgaacgtcctcgaagttgcctgtggcaaacaacgcacggatagtattactgatgtcatcatcactgacggtatcgcctacgcgaaccggcatattaagtaacgccgcaccgacggcgactcgctgcaggccctcgaaatgaatgtctttcactacgaacccgtctgcaccgtatacggtggcgctgccaaacagcagcgacgctatgagcaactttttcatcgccatcgttgttatgcgttcttcctaacctatcccctgccgttaaaagcgggagaaatcattgaaaagtgcaagtcccatcaacagcattagcaatatcgagccaatgcggtagctgaaatcttgaactcgctcagaaaccggcccacccttgagcttttctatcgccaggaagagcagatgtccaccatctaataccggtaacgggaacagattgataatccccaggttgacactaatcagtgccaaaaacatcaggtaataaaccaatccgaactcggctgaaacccctgcgccctgtgcaatggaaatcgggccactcaggttattcagcttaacatcaccagtaatcagtttacccaacatgttgaccgtcaaccgcatcaactgccaggttttatccccagcctgatagagtgccgtaaacggaccatattggcgaatcgttttatactcatccggaagcggtataactttcggaattacgcctgcaaagccttcggttctgtctttacccgccgattttgtatctggaatcagggttaaagacaagggagaaccacccctttcaatttcaactgccagcggcttgccaggattttcgcgtacccggctggcaaatgtctgccaaccttcaactagctgaccgtcaactttaacgatcctatcccctgcttgtaaacccgccttttgcgctgccgactctgtttgaacctcttgcagcactgattcaatctgcgggccacgaggaataatccccaaagtcaccacggggtcctgcttatcaggctcgaacgaccattgacgtaaatccagagttttctgtactacgttatcagagccaaaaggggctacgccaacttgcacctgctggtcgccaattttaccgaccagagcaagacgaactgcagaccaatcaggcgtttcgataccgtcaacagacttaagttccattccagcagaaatatcagcctgcgcagcaatggattgtggggatatttcacccacaaccggacgaaagctcgggatgccgatgataaacaccagccagtaggcaaaaatagcgaagaggaagttggcgatagggccggcgctgacgatcgcagcgcgctgggcaatacttttattgttaaaagcctgatggcggaattccggggcaacggcctcggcacgctcatccagcattttcacataaccgccgaggggaatcagggcgatcacatattctgtaccttgtcgatcggttctgcgccataaggctttgccaaaaccgatagaaaagcgctcaacacggactccacagcgacgcgccacccaaaagtggccgaactcgtgaaccgtaattaagatgcccagcgcaatgataaatgcagccaggttccagagtatgctcatcataatccctaaactccccgtcagtgacggattaaaacactaacagcatcaggcaggcaaataccggcacggctgcggtcaggctatcgatacgatccagtatcccgccatgaccaggaatcagatgaccgctgtctttgattcccgcttcacgtttgaacatactctcggtcaaatccccgagtactgaggccagagccgcaaccacagaacacactaacagtttttccggaatcacatccagcggagcatagcggccaaacaaccaggctatcaacgccgatgacagcaagccgcctatcaacccttcccaggttttcccgggggaaactttcggtgcaagcttatgtttgccgaacattttgccaaacatgtaggcaccggaatccgcgccccacaccagcaacatcacgtaaagcagccaccaggcaccggttgaatgattttgctcataaccgtactgacgcagcgcaaacatgccccagaagaatggcactatggtcagaataccgaagataattctgatggttcgcgagtcacgccagaaagcagccgagcgcgggtaggtcaacaccagcaacagagcggctatccaccaccccatcgatgcccaaagcgggccactgacttgcaaatcgtgcactgtaggttgatattctggaatactcaaccacatcgttaccagcaagaaaccgcagagtatcgccagccagatgcgctgtgagtgcgaagcgaagccagcgagctgcccccactcccaagcagccagcatacatacagccagcgtcactatggcaaaaccaatcggaggcagcaaaaacagcgccccgatgacgatagggattaaaatcaaagcagttatgagacgatacttcagcaaaagttccccctaggatgcagcaacatcgttaggtgtcgttccaccgaagcggcgctcgcgttgtgcaaatgcattcagcgcaccttcaaagacaagttcatcaaaatcaggccaaaggacatcagtaaagtaaagttcagcataggctatttgccacagcaggaaattactgatgcgatgttcgccaccggtcctgatcactagatccacctgagactgttcgttcaggcaaatatgagaatttaacaaatcctcagtgatatcttcaggttgtaacaatcccttttgaacctgcccagccaattggcgcattccctgaatgatatcccaacgtccaccataattggcagcaatgttaagcttcaaaccatcattattttccgtcagcgcttcagagcgtcgaatgcgttcctgcagacgtccactgaagcggctgatatcaccaataacgcttaaacgtacgttatgtttatgcagacttttcacttcgctgtccagcgctcgaacgaaaagctccatcagtgcggtcacttcctgagcagggcgattccagttttcactactaaaagcataaagcgtgagcgcatctaattgatgagtggcggcaaaactcaccgcacggcgaactgatttcactcccgctttatgaccgaagatccttaatttaccctggcgtttagcccatcggccattaccatccataataatagcaacgtggcgcgggccttggggggacaagttagccctatcttcatttacggacgacataacgcgaacattcttcctcaataaatacgactgctcttccctaacattaggcctcatgcgcacaaaaaaagccgtgtactgaatcacggcttcttatatgacagccaaaccagagggtctaaatacccatagaaccgttaatcaagggtctgtctgcccattgacggcgcagactatatcatctcagtccgagacgaacaaattccaccaatgaataacatcaccttcaacgacttaatgcacctaatgctcgctcagcagcaattcgtgccaaacggtcaatatctaagacttcatcgactgaattgggttcctgcaatgccaaactttcgagcacatttctgtttaatctcgcaatatctgtgaaaccgatacgcgattgcaagaaagccatgacagaaatttcattagccgcatttaacactgtggtcgccgcttgccctgcgttaaaagcttccatcgccagctgcagacacggataacgctgataatcaggctctgcgaacgtcagcgggcccatacggcaaaaatctagcgcttcaacgcctgattctacccgatttgggtacgccatagcgtgggcgattggcgtgcgcatatccggtgtaccaagctgcgccagcacgcttccgtcctgatagcgaaccatcgagtgaatcaccgactgcggatgcagaatcacttcaatctgctcagccgaagcgttaaacagccagcgagcctcgatatattccagccctttattcatcatggtagctgaatcgacggaaatcttacgccccatcgaccagtttggatgagcgcaggcttggtctggcgtcattgtggcaaactgatccaacggcgtttcacggaaaggaccgccggagccggtcaggataatgcgcgatacaccattctcaatcagagaagaatagcctaactgttgctgaacgcgctctggcaggctttgaaaaatggcattgtgttcactatcgatggggagcagctgcgcacgactttctcgcaccgcgtccatgaaaagacgaccacaggtaatcaaagattctttattggccagcagcacttttttaccggcgcggatcgccgccagcgtaggtaatagcccggctacgccgacgatagccgccattacctgatcgacttcaccgagagcagcaagttcgcaggccgccttttcaccggctaatacttcggttttgctaccttgctcagacagcaaaaggcgcagcgccgcagcagaatctacgtccgccattgccgcataacgcggggcaaattccagacattgttctgccattaatgagacattgcgccctgcaaccaatgcggtgacggcgaataaatcgggattagcccgcacaacggccaatgtactgcagccaacggagccggtagaaccaagaatagtcagttgcttcatgagggtgctctgaataactgtttttatgataggaagatgcatcagtatgaaacatctgagcccgcaagactaagacatttagcccaaatatcagctgttgtcttcaataaaaccgtacagatgtaaaaaacaaagcgccgcctaagcgacgccttgcggaaccggttaacgattagaaattcattaactcagcttctttatcggacaaaatagagtcgattttcttgatgaaggtatcagtcattttctgaacttcatcctgacaacgacgatcttcatcttcgctgatagctttatctttcaacaaggctttaaccttatcgttagtatcgcgacgcacgttacgcacagagacacggccctgctctgcttcgccacgcaccactttgatcaggtctttacgacgctcttcggtcagcggaggcagcggaacgcggatcacggtgccagctgaagatgggttcagacccaaatcagaagacatgatcgctttttctaccgcggcgttcaggctgcggtcaaatacggtaattgccagcgtacgggagtcttctactaccacgttggccaactggcgcaatggcgttgcgctaccgtaatattcaacctgaataccatcaagaatacttggtgaagcacggccagtacggattttatcgatatggccctggaatgcttctacgcacttacccatgcgcacttctgcatcttttttaatttcgttaatcacgttgcgaacccttgtaaactggttacttggcaggctataccttgcagcatagccggtgaatatgtaaaccagcaattgctggttaaaagggactcagcgcacaattacgtgaagcccctgattagaacggcgctatttagcgatcaacgttccttcgttttcacccatcacaacacgacgcagcgcgccaggtttgttcatgttaaatacgcgaattggcaagttatggtcacgagccagcgtaaaggcggcaagatccatcactttcagttcacgttctaacacgtcttgataggttaactgttcgtacagcgttgcatcaggatctttcacaggatcggctgaatacacaccgtcaactttggtggcttttaacaccacgtcggcttcgatctcgataccgcgcaaacatgccgctgaatcagtagtgaagaatgggttgccggtaccggcagcaaaaatcaccacgcgattgtgacgcagtaggctgattgcttcagcccagctgtaattgtcacatacgccgttcaacgggattgccgacatcaggcgggcgttcacataggcacggtgcagtgcatcacgcattgccaggccgttcattacggtagccagcattcccatgtggtcgcccactacgcggttcatcccagcctgtgccaaaccggcaccgcggaataagttaccaccgccaattaccacaccgacctgaatacccagttcgaccagctctttgacttcctgagccatacgatccaaaacgctagcgtcgataccaaaaccttccgcgccttgcagggcttcgccactcagctttagcaggattcgctgatatacgggttttgcattggttgccatggtgttctgtcctaagcagcagtaatagtattggggatttgaccgtcatacattcaaaacacctataagtgcgctgaaagtttacggactaaattctagattggataaaatggaaccgcctgttggcggccccatttttaagcattaagactgtttgctcattgctgcaacttcagcagcaaagtcagtctcaactttctcgatgccttcgcccacttcaaagcggatgaagttgatcacgtcagctttatgctctttcagcagctcgccaacggttttgcttgggtccattacgaaatgctgaccggtcaaagaaacttcgccggtgaacttacgcatgcggccttcaaccattttctctgcgatttcgcgtggcttgccagattccatagcgatgtccaactggatttggtgctcgcgagcaacaacttcagcagggacgtcttctggtttaacgtattctggtttgcttgcagcgatgtgcatagcgatgtgcttaaccagctcttcatcagcaccggtagcggcaaccataacgccgatacgtgcgccgtgcaggtaagtccccagaatgtcgccttccagagcagcaacacgacggatattgatgttttcaccgattttagcaaccaggttagcgcgttgttcttcgaactgtgctttcagcacttcgatatcaacgattttgccagccagtgctgcatcgataacttcgtcgccgaatgctttaaagccagcatctttagcaacaaagtcagtttcacagttcagttccagcatcacgccgaatttgccgtctgcagaaactttcgccaggatgataccttcagcagcgatacggcctgctttcttggcagctttagcctgaccagatttacgcatgttatcgatcgccagctcgatgtcgccatcagcttcaaccagcgctttcttacattccatcatgcctgcggcagtacgctcacgcagttcttttaccaaagcagcggtaataacagccatttcaattttcctcggttctctcgtgaagatagttctcactgtagatacgcaaagggggcctataaaaggccccctaaccaacatatttcaatacctggttaataagggctcagtgacgagcctgtcttattattcagcttctacgaagctttcttccgcttgaacggccagatcttgagaacgaccttcacggacggcggcagcaacagcgctcagatacagtttaactgcacggattgcgtcatcgttaccagggataatgaagtcaacgccatctggatcggagttggtatcaacgatagagaataccgggatacccaggttgttagcttctttgatagcgatgtgttcgtgatcggcgtcaacaacgaacagtgcgtcaggtaaaccgcccatgtccttgataccgcccaggctgttttccagcttgttcagctcacgggtacgcatcagagcttcttttttggtcagcttttcaaaggtgccgtcttgagactggatttccagatctttcaaacgtttgatggactgacgaacggttttccagttagtcagcatgccgcctaaccagcgatggttcacgaagaactggtcgcagttatgagcagcttcttttaccgcttcgcttgctgcgcgtttagtaccaacgaacaggatcttacctttacgggaagaaatcttggtcaactcagccagagcttcgttgaacattggtacagttttttccaggttgatgatgtgaactttgttacgtgcgccgaagatgaaaggcttcattttcgggttccagtaacgagtttggtgaccaaagtgaacaccagcctgaagcatgtcgcgcatggaaacagttgccatgattaaaacctctatatttaacgattggggttatgcctccacgtgtcccataacaccgaccccacaagcctccgctataagacagcgactttagggcaccccggtgtatgtgccgacacgtgtgtgttatttacacatatgagtgcgattagtactacttggctgaagactcattgctgccctaaggacaaatgacgcagagcggatcgccggcgcgctttataccataatccggcaccatacaccaacttttgttgcatttcgtggcagcataaaaaggaaagtttggcagcaatttgctgggctggtaccatgtgcaacagcattttttacttatttaatcataacagcggccacgctctggcccctgtggaccttttcttcatggctatcacaattaaaacacctgcagatatcgaaaaaatgcgcgttgccggccgcctggccgccgaagtgctggaaatgatcgaaccttacgtaaaaccgggcgtaacgaccggcgaactggatcgtatctgccacgatcacatcaccaataagcagcaggctatttccgcctgtctgggctaccacggcttcccgaaatcagtctgtatttctgttaacgaagtcatttgccacggtattccaagcgacgataaagtgctgaaagacggcgatatcgtgaatatcgacgttaccgtaatcaaagacggtttccacggtgatacgtccaaaatgtttatcgttggcaaaccaactattctgggcgagcgcctgtgccgcgtcactcaggaaagcctgtatctggcgattaaaatggtgaaaccgggcattcgtctgcgcaccttgggtaaagagattcagaaattcgtcgaagcggaaaacttctccgtagtacgcgaatactgcggccacggtatcggtgaaggtttccacgaagagccacaggttctgcactacgatgcagatgacggcggcgtggtgctgcaacccggtatggctttcactatcgagccgatggttaacgccggcgattaccgcattcgcaccatgaaagacggctggacggtaaaaaccaaagatcgcagcttgtctgcacagtatgagcatactattgtggtaactgagaacggctgcgaaataatgacgttgcgtaaggatgacaccatccccaacatcataacgcacgagtaatgacgacaagccggcaatcgccggcttttttatgggctgcgttttatatcaggaacccctatgtctgaccacaacactgaaaaccctctcccatcggcatcagtgagggctctccctgagcagcctgcatttcccagcacttattctgatagcgaactccactgccaaccgttgaaacaacgtctggaaaccttccagaactggctggccgacgccttcaatgcaggggtgagcgcggaaaaactggtggcagcccgtagcaattatattgatgctctattacagcgactgtggtcattttatggctttgagcatattccgcagaccgcactggtcgccgttggtggctatgggcgcggcgaactgcatcccctgtccgatattgatgtattggtattaagcgagcagcgtttaagcgatgagcaggcgcagcgcgtcgggcagcttattaccctgctatgggatttaaaactggaagtcggtcacagcgtacgcagccttgaagagtgtctgctggaaggcttggctgatttaaccgtcgccaccaatttgatcgaatcccgcatgatttgcggtgatgtcgcactgtttttgcaaatgcagaaacacattttcagcgacagcttctggccctcacccgaatttttcgatgccaaaattgccgagcaacaagagcggcacaaacgctaccacggcaccagctataatctggagccggatatcaaaagcagccccggcggcctacgagacattcacaccttgctgtgggttgcccgccgccactttggtgccaccacgctgagtgaaatggtcgagttcggtttcctgaccaaagcggaaagcaacgagcttatcgaatgccaaagcttcctgtggcgcatccgttttgcccttcatctggtcttaaatcgctacgataaccggctgctgttcgaccgccagcttagcgtggcacaactgcttcgttatcagggagaaggcaacgaaccggtggagcgcatgatgaaagatttttatcgtatgacgcgtcgtgtcagcgaactgaacaacatgctgctacagctattcgatgaagccatactggcactggatactaatgaaaaaccacggcctttggatgatgatttccagctacgcggcaatctgattgatctacgggatgagcaactgtttatccgccagcccgaaaccatcatgagaatgttttacctgatggttcgcaatcaggatatcatgggaatctattccaccaccgtgcgccaactgcgccacgctcgccgccacctaaaacagccgctgtgtaccattccagaggctcgtaaactgtttatggctattctgcgccatccgggagccgtttcccgcgccttactgccaatgcaccgccacagcgtgctgtgggcctatatgccacagtggggcagtattgtcggccagatgcagtttgacctgttccatgcctacaccgtcgatgaacacactattcgggtattacaaaaactggaaagcttcgccgacgaatcaactcgtccgcgtcatccattatgcgtagagctatatccgcgcctgccgcagccggaattactgttgctcgccgcgctgttccacgatatagccaaagggcgcggcggcgaccactcaattctcggcgcgcaggatgtgctggaatttgccgaattacacggattgaactcgcgggaagctcagcttgttgcctggctagttcgttgccatttattgatgtcagtgacggctcagcgtcgtgatattcaggacccaacggttattcagcaattttctgccgaagtacaaagtgaaacgcgcttacgctacctgattagcctgacggtggctgatatttgtgccaccaatgaaaacctgtggaatagctggaagcagagtttattgcgcgagctatatttcgccactgaaaagcagctgcgacgaggcatggaaaacagtccggatctgcgagagcgcgtgcgccatcaccgcctccaggcgctggcattactgcgaatggataatattgacgaagaagcgcttcacagaatctggagtcgctgccgcgccgattatttcctacgccattcaccaaatcaattagcctggcatgcccgtcacttacttgagcatgattccaccaaacctttggtgctagtcagtcgccaggctacgcggggcggcacagaaatctttatctggagcccggatcgcccttccctattcgctgccgtggtgggtgaattagatcggcgtaatctgagcgttcacgacgctcagattttcaccaatcgtgacggtatggcgatggatacctttatcgtgctagaaccggacggcagcccgttggcgcaggatcggcatccggtaattcgtcatgcgctggaacaggcaatgacacagccgaactatcagcatccgcgggtcagacgtttatcgcccaaactgcgtcatttcagcgtgcctaccgaggctaacttcctgccaactcatacagatcgccgtagttatctcgaactgatcgccttggatcagccgggattattggccagagttggggaaatatttgctgatttgggattatcacttcacagcgctcgcatcaccactattggcgaaagagttgaggatttattcgtattagcagataaggatcgtcgggcattgaatgccgaaacgcgaaaggaattagcacaacggttgacagacaccctcaatccgaacgataaactgtgatacaaataactttttaacgattattttttcttacaacctttcaacttcaggaaagagaaccggatgcagcaactacagaccgttattgaaaacgccttcgaacgccgtgcagagatcactccggctaacgtagacaccgtaacgcgcgaagccattaaccacgttatcaatctgttagataccggcgcattgcgcgtagcggaaaagattgaaggccagtgggtaacacatcaatggctgaaaaaagccgttctgctctccttccgcatcaatgataaccaagtgatggaaggtgcagaaactcgttattacgataaagtcccaatgaaatttgctgattacgacgaagcgcgcttccagcgcgaaggcttccgcgtcgtacctccggctaccgtgcgcaaaggcgcttacattgcccgtaacaccgtgctgatgccttcctacgtcaatatcggcgctttcgttgacgaaggcaccatggttgatacctgggcgacagtaggttcttgcgcacagatcggtaaaaacgtgcacttatccggcggcgttggcatcggcggcgtattggagccattgcaggctaacccaaccatcatcgaagataactgcttcgtaggcgcacgttcagaagtcgttgaaggggttatcgtcgaagaaggctccgtgatttccatgggcgtattcatcggtcaaagcactcgtatttacgatcgcgaaaccggcgaaattcattacggtcgcgtaccggctggttcggttgtggtttcaggtaatctgccgtccaaagacggtagctacagcctgtactgtgcggttattgtgaagaaagtcgacgcaaaaaccttgggtaaagtcggcattaacgagttattacgtaccatcgactaacattcaactagcgggccaatcagcccgctatttttttgtcttgtaagcagttatcgcctgcaatcacatattatggcaacaataaccgccataatagaaactgtggaatataaaaccaataaggtggcgctatgtatgacaacctgaaaagcttaggaatcactcaaccggaagatgtcgatcgctacagcctgcgtcaggaggccaataacgacattctgaaaatttatttccgcaaagataaaggcgagttttttgctaaaagcgtcaaattcaaatatccgcgtcagcgtaaaaccgtagttgcggacaacgccggacaaggttacaaagagattcacgaaattaacccgaatctgcgttatgtgattgatgagttggaccaactttgcaaacgcgatcaagttgaagtggacttgaaacgcaaaattctggatgacctgcgtcatttggaaaacgtggttgctcacaaaatctctgaaattgaatccgatctggaaaaactaacgaaaagcggccgctaatacctgcccataatccgttaggaacaagatagacaatcacaaaacaaacagtaaaaagtggcgatatctgttcgccacttttatttacatcaatttatttacgctgagcgtgtgagcacggctacggctggattccaacccggtttatttcagcaactggccccattgctctacccacgggcaggaaaccgcctcaggctccggctgctcaatcgcatcaatttccaagatctcgccgatacgcgtcgcgccctgctcctgcaataaagcgtcaaaagcacgacctgcgccacagtagttatcgtagctgctatcgcctaatgcaataacgccgtagcgcagctcaggctggtaaccaacctgatcgcgcacagcctgaaacaacggcgcgatattgtcaggaaaatcaccttgcccagtggtggacgtgatcactaacgcataatgctggcgataatattgccaggcttccagcgtaccttcgtcaaatagcttaacttcgtggccttgctcattcagtatgttttcagcttcttccgcaactaaaagcgcattgccataaaccgtaccgacaaaaatacccacctgagccataaaaaaccttctttaaattaccaataagttactcactatcctgaccttcgtcgccaagaaactcaaccctttcaagctcagggagaaggccttcccagccaaattgtgacatcacgccctgccaggcactgtcccagcgcgcagatagcgccaaggattcaccggtgaccggatgattcagcgataaatggctggcatgtaacattaaacgtgagcaatcaaaatgttgcgacattccgcgattctgacgtaaatcgccatgcgtgctgtcccccagaatcgggtgacgaatatgcgccatatgacgtcgtaactgatgtttacgcccggtttccggagtcagttccatcaagctgtagcgagcggtttcgtagcgaccaatagcaaccggcatctcggctctcgctaacgcacggtaatgcgtaatcgctggttttggcgctttatcccggctggcaaacttatcggcaattttgtccaactcttcggtcaaagcgtagtcgagagtgtcgtcttctaacacataaccgcgtacaaccgcatgataaaccttcttaacttcatgttgttcgaactgttgtgacaatgcgcgtgccacttcgctagacagcgccatcaacaatacgccggaagtcggacgatccaaacggtgtagggtatacacatgctgtccaatttggtcacgcaccgtttgcatcacaaaaacggtttcattacggtcaagccagctgcggtgtaccagccaaccggcaggcttattaaccgcaacaatatgttcatcttgataaagtatttcgagcattattcgctttctatgtttaacaggtcatcgagacgctgcaactgcgccagaagaagactgcaatccgtctgatgatctttcaacgccacctcaaaataaggcgttacggcaaagcgggtcggtaagggagcatttttttctagcagcgcattcattcgcggtagcaatacccactgaagccattgctcagcggccatggtatcgacgcaaaaaggctcaacgctttcaaaggcctcagcctcaggcggagatgactgccaaagattaatggtgcgtaatgccagatcgatatcctgtaaaatctggcgtacctgattgtttagactcatgttttaattctcgaccaaaaatgggccaacacaggccagaaaggaaggttcactccagataatccggatgaaaacaaaagcgcgcaagcataccatcgaagcgcaggagacccaactatcggctaactaaatccgctatcagtaaactaattaaaggaagcgagcctaagccgcagtgaaaaaaagcataaaaaaaggggtactgtttgaccagtacccctctgttcgttttatagcaatccagctaaattgatgctccctgctcaatccttgaaaacttttcctgcggttatcctaaccagcaatccttcgcgatgtcctacaccatcctggtgcgatccttaggtcatcctaacccaccaataatcctttatcggctccctatctccatcctggaggtgtcccttgtttcgtcctaaaacatcccttcactcgtcctgagcagtccctgatttccttcatcctgaagctgcatcatcccgatgctgttcctttccaaccagatcctatctggtgaataaaggatcgcttaattggcgaacagagacaagatactgtaaagcctcttatctatacgttttaatagacaaaaaattgaatgtttataacggagtgattttattgagaataattctcacgcaagaaaatcatcttcaaaaaatagaagctatgtcttacaggccgtgtgagagatctctcacacggaaatcagataaccttaattaaattaaggtttagattggcattactgggcgcaatgcatcgaggaaatggctcaggttggaggctaaaagcgtacgttgattactgccaaagtgctccaaaacgacattgccagtaacgttgcacagcgatgccattgtcatttcagattctgtcgttgccagaaacagcgtcggggacagtttgagccgtttttgcgtaaccaaatgaccgataaggttttcctgtaatcgagtaaaatcatcctcactccatacctgcaacagagtaaaacgatgatcgcccaactccgcggtcatatctcccgcatactgctgcgtgtaaaaggtatgaatatcgtcatgtaactggatttctaacgcgcgagccacgttttctaacgttgctgccggcaagaatggctgcggaagccaataaatctgatcctcgtgcgtttccgtgatacaaggcgaagccaccccgtacaactcgtggctggctggcgcatgggcggtttgctgctgccatagttcaacgtagcgctgcgtaaagctctgtagagcggttgaaacattctggtccatattttctctcaacatccgataagcctgcgctaaactgggaaacgaaacttcgccttcagcgacaatgcctagcgcggcataaatggtaaactgtcggctattgtaccgatctctcacctagggaacagcatgtcttcatatcaagatcatcaggctctggccgaactcactttaggtaagcctaccgcttaccgtgaccactatgatgcggccttgctacaggcagttccccgcagtatgaatcgcgagccgctgggattatatcctgataaccttcccttccacggcgcggacatttggactatgtatgagttgtcctggctcaatgccaacggcttgccgcaggttgccgtcggcgaaatcagcctgaatgccgatagtgttaatcttatcgaatccaagagttttaagctgtatttgaacagctttaaccagactccgtttagcgattgggaaagcgttcgccatactttacaacaagacctatctatctgcgcgcagggcgaagtcagtgtcacactctataaactgagtgatatagccgggcaacctattgctgatttccatggagaatgtctggatgaacaagatattcgcatcgataattacgaattcagcaccgattatctgaaagatgccacgggtcaacagatcgttgaagaaacgttggtcagccacctattgaaatccaactgcctgatcactcatcagccagattggggttcggttcaaatccgctaccgtggcccacaaatcaatcgtgaagcattgttgcgctatctggtttccttccgtcatcacaatgaatttcatgagcaatgtgtggagcgtattttcaacgacttaatgcgcttctgccagcctgaaacgctgtcggtctatgcccgctatacccgccgcggcggcctggatatcaacccttggcgcagcaataccgacttcactccgtcgaacgggcgtttagcgcgtcaataatgcgtgccattacgcaacattggcagtaaaaatctcgttagtattggcaaaaaacaagggacaacgttaaggtgaattgaagtgtgttacggcaataatgaacgataaagactgccgtcacctgaagaacaatttatgtgatatttcaatggagacatcgagagcggagctctggtacgcaaaaaagcgagatcataaagagaatagccgctctctggtgcaatgcagttacgacggcccctctgcggggcgtaaaggagtcattttgattacacatattagcccgcttggctcaatggatctgttgtctcagctcgaagttgacatgctaaaacgcactgccagcagcgacctttaccgcctgttccgtaattgctctctggcggtattgaattcaggtagccagaccgataacagcaaagagctgctatctcgctacgaaaactttgatatcaatgtgttacgtcgcgagcgaggcgtcaagctggagcttgtcaatccgccagaacatgcctttgttgatggacgaatcatccgttcactacaagctaacctgtttgcggttctgcgagatattctgttcgtgaatggtcagatcgtcagtgccggacgtttccagcacctgaatatggaaaactccagccatttgaccaatctggtattttctatcctgcgtaacgcccgcgcactgcatattgatgaagatcctaatatggtggtgtgttggggcgggcattctatcaatgaaattgaatatctgtatgcccgcaaggtcggtagccaactgggtctgcgtgaactaaatatttgtactggctgcgggccaggtgcgatggaagcgccgatgaagggcgcggcggtaggccatgcgcagcagcgctatagacaaggtcgtttcatcggtatgaccgagccttcaattattgccgctgaaccgccaaatcctctggttaacgaactggtaatcatgccagacatcgaaaaacgtctggaagcctttgtacgcatagctcacggcattatcatcttccccggtggcgttggtaccgcagaagagttgctctatttgcttgggattttgatgaatcctgaaaacagcaatcaagttttacctttgattctgaccgggccaaaagagagtgaagattatttccgggtattggacgatttcatcgtgaatacattaggagagaaggcgcggacttactatcagattattatcgacgatccggacgaagtggctcgccaaatgaaaaaagccatgccactggtgaaagaaaatcgccgaaataccggcgatgcctatagcttcaactggtctatgcgcattgaaccagacttgcaattgccatttgaaccaacccacgagaacatggctgcactgaatttataccctgatcaaccggcagaaaagctggctgcagcactacgtcgggcattttcaggcattgtggctggtaatgtaaaagaagtcggcattcacgccattgaggcttatgggccttataaattacacggcgacccacaaatgatgaagcagatggatcatttgctacagggctttattgctcagcatcgaatgaaattaccgggcagcgcatatacgccatgttatgaaatctgcccttaaacgcgagcggctacgcgtgctcaataaggtttaagcggcagtgaggataatccccgatacttagtcattctaagtatcgggagagtacggggagtaataaagtcgatgcgatagcatgacgtatcagaagtatcagaagtatcagaagtatcagaagtatcagaagtatcagaagtatcagaagtatcagaagtatcagaagtatcagaagtatcagaattatcagaattatcagaattatcagaattatcagaattatcagaattatcagaattatcagaattatcagaattatcagaattatcagaattatcagaattatcagaattatcaataataccgattttattttcacccacacaatttcgactatcaggactcttgccttcaggttatggatatacaccttcttatcgttgacgctctcaatctcattcgccgcatccatgcagtgcaaggttccccttgtgtaaatgcctgtacccatgcattacagcaacttatttcacacagccagcctacccatgcggttgccgtttttgatgaggatgaccgttccgatagctggcgccaccattgtttgccggattacaaagcagggcgatcgccaatgccggataatttacagcaggaaatgccgcagcttagacaagcttttgccgaactgggcgtcccctgctggcactctcccggcaatgaggccgatgatttagccgccacgctagcagctaaaattgccggagccggacatcaggtcaccatagtttctaccgataaaggttactgccagttattggtgccaaacgtacagattcgggattactttcagaaacgctggctggacttaccattcgtcaaacaagagtttggcgttgccccacatcaattacctgattattgggggctagccggtatcagcagcagcaaaatccccggcgtagcagggataggcgctaaaacggcagcggtgttattgcaacaggtcaacagcctggaagagttatatcaaaacctagaacaggttccggaaaagtggcgaaaaaagctgcaacagcatcaggacatggcctttatctgcaaacaggtagccacgcttaaaacagatttaccgctgaacggtaacctgcaacagctacgcttaggccatagttaagggagcaatcggcctaatgctggtcacttaaggtgaccaactgcctttttatccgagctggtaagattacgggcatgctcaggaaaagtgagattgataatgccgagggcttgtgaaagttccattaaaaagggttcatgcagagacatgaacccttttacatcaaccaacggatcggtcaaccgctcattaaacgatcggcattagccaatcgcccccctgattttacatcttagctattgaatctctgccgttgacccgaaggttttaaagatcggggtttgaacgtttaattttgaatcccgagcgcccaatcactcacgtttggctgtgagtgaaatcatagatttagctttaaccaacaactaaatacgttcatctctacgacctggaacgccagcccagatacgacgaacatgcacggtcacttcctcacgatcgtgataaagctgtttagcctgaatatgcgcattaataccgttttctttcaactgttcatccatcatcgccaggttttgcaacacttcttcgtagcgctttttcattggcaatttaagattgaaaattgcctcacgacaccagccattgaccagccagtcggtaatcagctgcgttactcgcgctggcttttcaaccatatcgcaaaccagccaatagatattgctgcgcgttggctcatatttgaatccgtccgcacggtgatgagtcacctgcccggtatccatcagactctgggccatagtgccgttatccaccgcctgcaccatcatgctgcgttgaaccagctgataagtccagccacccggacaagcgccgagatccaccgcgtgcatgccgcttgccaagcgttcttcccactcatccgcaggaataaattcgtggaaagcctcttccagcttcagcgtcgaacggcttggtgcatccgaagggaatttcaggcgcggaatccccatatacagaggagagttgttgttactgtaggaataaccgacataacagcaaccagaagcgataaagaatacgtgaaccaccggacgatgcggattttcacgagtctgcaaaatcttctgttcacgcatcgcggcacgcagcggcaccgtcagtttgcggcagaatttaagcaattctttactctcattggtgtccggcacttcaactcgcagttcaccggctttttccaccacgccgaccaacatccctacgatcggagacactcggtcttccggcggcagatcctttagcagttcgccaacaaccatcatttgccgagcaaaaatcagctctttaaacggcagctcgcgaatcaggcgatccgcatcttcatgctggtaacactcgaataagacataaccgctattatcttttacccgagcaaaaccaaagacttcgtgttctgcggccttggcggtaatttccgccgcacactctttttcaaagccttgacggcaatataaagcaattttattcatggcgttctgcccttttccgtagacgcagcgcgccaatcaacatcaaaatccatcccgccagaaagcatacgccgccaatcggcgtgacatatacccaaagtttcaggtgcgatagagccaggcagtagagactgccactaaataacacggtgccgagggccaataaagcgccgctccagtaaaaccaaatactgatctggcgctgcatagcaacggccaaagcgagaatagccagagtatgaaatccctgatattccaaaccggtacggatccaggccatttcatttacgcccagacttccgcttaatacgtgtgcgccaaaagcaccaaaagcgacatagaaaaaaccgctgatagcggcaaagatcagcatcaaacgaccactcatcgttatttaccttattttatagatagttaccgtggtgaaattaggtaattttgcgttttttcacgatcaattttcgtagcggaatcgtaatttctcttgttcactggctgcccgagccagaatccactgacgaaaggcagctattttacccagttctgcctgactgtcatgacaaaccagataaaaagcatttttacttaccagaacctcattgaacggacataccaaccgccccgcttcgatttcggtctgagccatcacattattcaccaaagcaataccctgaccgtgaaccgcggcctgaaccaccatggcactgtgactaaaaatcggcccctgctgcacattaatttgcggaacgcccaactgacgggtataggccaaccagtcgcggcgggaagtatcatgcaacaaagtatgattagccagatctgccggcattttcagcggatgttcgcccattagcaggctaggagcacaaactggcagcagaaactcggcgtacaatctttcggtgcgcagccccgtccagttgccgcgaccgtagaaaatagccacgtctacatcatctgccaatttatcttcttcacggtcaacggcctggattctgacgtcaatccccggataagctgagttaaagctagataaacgcggaaccaaccattgaatagcaaaactcggcggtaaactgaccgttaatgcccccttggcgctacgggcctgtaatttgcgcgtagcttcgttaatcgaagtgaaaatttctttaatatccaggtagtaactttgcccttcttccgtcagcagtaaggaacggttacgtcgacggaaaagcttcaggcccagaaagtcttccagagatttaatctggtggctaacggcggcctgagtgacaaataattcatccgccgccttagtaaaactgaggtggcgcgcggccgcatcaaacacgcggagagcattaaggggtggcaatcgttttgacatgaattggatacttttttataacggctcatccgcggatgaaaccctttgtttacttattagtttttgtaatgcgagccattataaattgtccgttgatgatgcgccagcaaatacctatagtggcggcacttcccgagccggaacgaaaagtaagtttagtatccaggtactgaattgcttttggctttgtggttgtgatgttgtgtttgcaaatggtctggaatgccagacatagtagctaagctactgttttttcacttcctgtacatttaccctgtctgtccatagtgattttatgcagcaccgccccataaagcggtgcttttttttatcttaagtttaagcttcactgcgcgttgcacgtcagaaaagcttaaacttaatcaggtagtcaggctaaaatccgccggtattatttcccttccgccatttcttttacttcggaacggttaatttgctgttctgtgccgttggcatcaatgtaactgatcataccggtatcattatcgactttaggtttaccatcggcgacgatggtgcgaccatcattggtatgcatgacatagttgcttgagcaggctgcgagagtaaaagtaagcattaaagcggaaagtacggcagctgtctttttcatggatcactccttgcagattaaaatactgaaaaaaataatttagattattaaattaattattcgccagacactattcagcataacaaacttattacatatttccatgaatctgggcaattagcgggctaattacccgttaaacaccgaaaaataagaatgatcttagcttttcagaggatttgagcactgtatgaagtcttttaaccccgcagcttttcgcgcagaattcccggctatcaatagttcgggaatttacctggatagtgccgctaccgcgctgaaaccccaaggggtgattgatgccactcaacagttttatgcgcaagatgcggccacggtacatcgcagccagcatcaggccgctcgttccctgaccttgcgttttgaacaagctcgtcagcaagtcgctgattttattaacgctcctacggcagaaaatattgtctggaccaaaggcactaccgaagcgattaatctgatcgcgcaaagctacgctcgccctcgcctccaacccggagatgaaattctggtgagcgaagcagaacatcatgccaatctgattccctggctaatggtcgcagagcaaactggcgcaaccttggtaaaactaccgctgggcagcgactttctccctgattttcagcagctacccgcgttattgaccgggaaaacgcgcattttagcgctggggcaaatgtctaatgtcaccggcggtatgcctgatttggctttggctatcgatctggcacacagtaaaaactgcatagtggtcgttgatggtgctcaaggtgtggtacacagcccggcggatgttcaggattttgatattgatttttatgttttttctgctcataaactctatggcccgacgggaattggcgcgttatatgccaaaacagaactgctggaagaaatgtctccttggcaggggggcggtaaaatgctgactcaagcttccttcgccggttttactccgcaggatgctccttaccgtttcgaagcaggaacccccaatatcgccggggttatcggcctgtccgccgcacttagctggcttgaaaatattgatattgaagcggcagaagaatacagcagtggtctggctacgttagcggaagaaaaactgagcaaactggacggatttcgcagttatcgttgctctcactccagcttgctggcttttaactttgacggagtacaccacagcgatttggtaacactgctggcagagcaaggtatcgctctgcgcgccggtcagcattgtgctcagccgctaatgagtgcgttgggtatcagcggtagcctgcgagcctcgttcgcgccctacaatacccgtgaagaagtagaaagcctctgctcagcgataactttcgcgctaacattattgcaggattaatgaaaacctcaggaaaagctgaggctcactgaatagaaaagagaagaaaatgaccgccccacatccatttggccaagaagttacccgcgacgaccttatcgagaaattcagtactctgaaacagtgggaagatcgctaccgccaactgattttgctggctaagcagttaccgccgatggatgaatcgctgaaacaaactgaattcgaactgtccggctgtgaaaaccgagtctggcttggccacgaacttttggcggatggccgactgcatttttatggggacagcgaaggccgaatcgttcgaggtttactggcggtattactgaccaatgtggaagggaaaacgccccaacagattttgaatcaagatccgttagatttgtttgatcgactggatctgcgccaacagctaagcagttcccgcgccagcggtttacaggcactggcgcagggcgttaaaacgattgctgctcgctatcagaatccgatttagaccgcctcaagttgtcgcgccgcttttgccagcatttttttcagggcatgagagaccgcaacaaaaccgaaggtggcggtgaccatagtcaccgaaccgaatcctgaggcgcaatccatctttttagggccttccgcagtgctgcgggaggcacagacggaaccatcaggttgcggataaaccagcggttcagtggaaaaaacgcaatcaatcccgagcttacctttgctgtttttcactacgttataatcgcttttcagcctttcacgcagtttagctgccaacggatcctgaatcgtcttggctaaatcaacaacttcaatccgagttggatctatctgaccgccagcgccaccggttgctataaccggaattctatagcgacggcaataggccagtaatgccgctttgggacgaatgctatcaattgcatcaatgacatagctaaagtttcgatccagcatctcagccacgttgtctggcgtaataaagtcatcaatgcaggtaacctgacattcagggttaatcgcccgaatacgctcggccataacctctgttttagactgccccacatattgtctcagcgcatgtacctgcctgttggtattggttacacacacgtcatccatatcaatcagagtaatggcaccgataccggttcgggctaaggcttctgccgcccaggaacccactccgccaataccaatcacgcaaacgtgagcctgcgaaaataccgccagcgcctgttgaccataaagacgggctatgccaccaaatcgctgttgataagcttcagaatacagtgtgctcataaccttatttgtaccttatagagaaataacctaaaaccagtctacgaatgcaaaagcggccaattggccgcttgataagctgtgactgtaaacagagtcacgccatgagtcgcctagttgttcactaaaagcgaagagctggaaggcgtgttagctttatcacctttataagcggtaaacattgggccaccgctttgagcatttttcagcacccatacacggccataatggttatagaaaccagcagcctgaccggcttcatgaccaataccctgataaatatcgaaatgctgacctttgattgctccaccgacgtccagtgcaaccatcaggcgcatttgatattgcccggtaaatttgccctgttcgtccagcagcggcacttcggccagcagcgttgttcccgcaggaattaatgaacgatccgatgcaacggaagctttcgcaatcaatggaaccgcgctcgcaccttttaccggggcgtacatttccggtttaaagaacacaaaggacgggttctgctctaataactctctgacttcagcttcactgtgcgtttcagcccatttacgaatagcctgcatcgacatatcggccttagcgacttcaccgcggtcgatcagcactttcccaatgctgcggtaagcatggccatttttgcctgcgtaaccaaagaaagtcagaggccgcccatcaccaaaatctacgtaaccgctgccctgcacttccatcataaagttatccatcaacgaattggtgtaagcgataactaaattgcgatcatccaatgcgcccgcgtagattccggcgcgatccggcagacggcctttgccttttttagatggcatacggtacagaggatgacggaattctccttgcggcgtatagcgagcttgtaaaaccggagtgtaatagccggtaaactggacgtttccaaaattatccaccccttccatttgataagcgttcaaaccaaacaggctgagtttgctggtatccgcacccgctaacatccagttttggactgcttcaaaagtattactgtggcggttgtaaagattaggtgaagcctgattaatcactttcacctgatctgaataatcttttgcgttgaccggcttacccgtggcgctgggttcattcaccagttccagagaatggctcaatcgaccatccttatattgttgaccacgatcggtgggccgtgactgacaaccagccaatactgcaatcattaatccgctcagtaggtatttgccccaacgtcctttcattacacgccttcttatacacacattttatcttccggctgaacgataacaaacgcctatggataaaggaatcagtagccacaaaaaatcatatactgactcatattgcccattacgtagaaaaacaaaccacatagttcacaaattagtcaattgattgtctttatgcagtttaaatgccaaaagcacttgcaagaaatgtgatccagagtatagtgcgctgaatcggacgcggggtggagcagcctggtagctcgtcgggctcataacccgaaggtcgtcggttcaaatccggcccccgcaaccaaccgatactgattaccagcagtatcaaatgtcgtccgatagtcttgaaataatagtaaaataagttgttagacggacgcggggtggagcagcctggtagctcgtcgggctcataacccgaaggtcgtcggttcaaatccggcccccgcaaccaacaacttgatagtcagtagaaaataagcattaagacggacgcggggtggagcagcctggtagctcgtcgggctcataacccgaaggtcgtcggttcaaatccggcccccgcaaccaattcttaatcacagttttctaactcaagacaccctcaagggtgtttttttgtttctggcctccggaaactaccctatcccgtctgacttccctaatgtatttccttactccattcccaatcagccaatccttggaccgataaattccaaagcgccttaataccattcccagcgccattacacccgagcaactgccccaccgttagcaaagtaagctttgattccggcaaatacagattcagcaatttgttgttggaaatgactggtacgtaatttacgttcttcttctacgttactgataaaggcggtttctaccagaatcgaagggatatccggcgcttttaatacggcaaatccagcttgatcaactcgatttttatgcagtttattaattttacccaatcgatgtaacacttctttaccaaattttaggctgtcgttaatcgtcgcggtctgtagcaggtcaatcatggtgtgatccagatagcggtcgccgcttttactgacgccgccgatcaggtcagcctcgttctgggtttgcgccaggaatttcgccgccgtactggttgcacctttggtggataacgcaaataccgacgaacctcgagcggctctattggtaaacgcatctgcatgaatcgaaataaacagatcggcgcgctgcttacgggcttttgccaccctgactttcagcgggataaacacatcttcatttcgcgtcataaatacccgcatatttggctcacgctgaatcagcgcgcgaaggcggcgggcaatttgcagcacaatgtctttttcgcgagttttgtttttccctattgcgccagggtcttcgccaccgtgcccaggatccagcataataacaatcgggcgatcacgtcctgccttacccgcccgagccgattcggccggcaaggttcgctccacgttacctttgttgtaatcctcaagtagcgccaacaaaggatcgtcttcctcggaaacgcctcccttagcgggataaagatcgacaaccagacggttacggaatttggaaacaggcttcagggtaaacagctgcgggctaatactttgcttgagttccaatactagacgcacggtatttttatcaaactgtccaacgcgagcctgctttaagtaaggatcgccagattggatttgctcaccaatctctttcagtacgctattgagatgaacgccttcgatatccaccacaattctgtcgggattcgttaaagcaaattggcgatatttaagtggcgtattcgattccaacgtcacacgggtataggttgaggaaggccataccctaacggcaactacctgagatgcggaggcaaatccaacctgactaacactgagtaaccaggttgcagctacgccttgcagtaaacggcgacgcgcgggattatgatctgaatttgccatggaactccaaagtaactaccaataaacgatgaaaaaacaaccaaaaaagataatgatggcaaaactttagcgaatcactcctcctctgtcatcagaaaacatttttatgttattcaatttattactctctcatagccatacacatgcatttaatagcaatttcttgcttgccttcacggccacaaaagaataaaaatacaaaaataccgaataaaaattcaaagagggtctgccgtgaaggaacgtagtactgaactggtccaagggtttcgccactcagttccctatattaatgcgcaccggggcaagacgtttgtcgtcatgctcggcggggaagcgatcgaacatgaaaacttcgccaatattgtcaatgacatagggctattgcacagtctagggattcgtcttgtggtggtttatggtgcccgcccacaaatcgacagcaatctcgctcagcataactatgaacctatttatcataagcatactcgggtaactgattcccgaactctggagttggttaagcaggcagcaggattacttcagttagatatcaccgctcgtttatccatgagcctgaacaacacgccactgcaaggtgctcatatcaacgtcgtcagcggtaactttattatcgcgcagccgctcggcgtggatgatggtgttgattattgccacagcggccgtattcgccgtattgatgaagaagcgattcatcgtcaactggatagcggggctatcgttctgatggggccggtggccgtttctgtcaccggagagagctttaatctgacctctgaagaggtggcaacgcagcttgcgattaagctaaaagcggaaaaaatgatcggtttctgctcatctcaaggggtaacggatagagatgggaatattatttccgagttgttccccaacgatgcccagaaacgcattgaagaactggagcaagaaggcgactaccactccggcacggtacgtttcctgcgtggggcattaaaagcctgtcgcagtggcgttcgtcgcagccatttactgagttatcaggaagatggagcactagtgcaagaactgttctcccgcgatggtatcggtacccaaatcgtaatggaaagcgcagagcaggtaagacgtgcaactattaacgatattggcggcatactggagcttattcgtccattggaacaacaaggtattttagtgcgccgctcccgtgagcagttagaaatggaaattgataaatttactatcatcgagcgtgataatttgactatcgcctgcgcggctctctatccattcccagaagaacacattggcgaaatggcctgcgtagcggttcatcccgattatcgcagttcgtcccgcggtgaaatgctgttaaagcgggtagccaatcaggcacgccagatggggctgaaaaagctgtttgtgttaaccactcgcagcattcactggtttcaggagcgcggttttactcccgcagaagtggacgttttgcccgttgagaagcaggaactgtacaattatcaacggcgttcaaagatcttgctggcagatctatagctcattgatataaatagcccgttgatataaataaatttgaatctgagaatttaaaaagcgcagctcgttaccggtaaagctaataatcgatggtacaaattattagtgggggttcgagctgtaacttttatttatgggcagcgcttatgtgtagatagatgtcgatgcgtagatgctgatgcgtcgaaacgacagatttcttatacgacgaacgtcaaaaaccaagcaaacaaaaaaatagcaacaaactgatttataacgatttatacatccccctgccgttactcttttttgatcatcaacataccaaaacattaactgaaagcccatcacctaacccttccgctgataagctttaccaggctttccatccgcttacgttgagatattgcgaccatttcccccattaaacatggcacccaaatcaccggctaaacgctagcgaattaagcgttccaccaaaccactgcgtcgctgagttggagtcaatattgcgctggtcaataccttatcagtgcaatagagcgttaagtgcttccgagcacgggttatcgccgtataaaccaattctctggtgactaccggaagaaaatggttcggtaaaactaacgccgtgtgctcaaactccgatccctgagacttatgcacagtcatcacataggctgtttcatggctgggcaaacgactcggttgtaccgatttaatgctgccatcaggtaactggaaatgaacgcgtaaatcgccttcagagtcatataaagcaataccaatgtcgccgttgaataacccaagggcgctatcattgcggtcaatcattacaggccggccaagataccagcgacctgatggcccaggaatccggcgaatcaatcctttctggttgagaatctgctcaattcgttcgttcagaccgctaacgccaaatggcccggttcgaagcgcacaaagcaactgataacgaccaaattcagtcaatataacagcgggatcggccccctcaaccacctgctgcaaataacgctgataaccgacgaggctatggtgtaatagaagttggtagtcctcagcgtcagataacgggaaatactcaatatcttcgaagttgccattcaatatggagagtgcctcacgaggcttacccgcgttgaccgctaacgccagttgtccaatgccggatttctcatcaaaacggtagcttttccggagcaaacacaggctatcgcgtatatttgccgcgttatcgatagcagttccagcaagctggcaaccggtcagacgcgtcagctcttctgcccgctttgggctataccctgactctaccagccggcagatatcccctaaaacggcaccggcttcaaccgatgccaattggtccctatctccgaggaaaatcactctagcctgcggtggcagtgccgcaatcaattttgccatcataggtaaatcaaccatcgatgcttcgtctaccaccaatacatccaaattcaacggatttccccggtgaaagcgtaaacgttggctattgggttgagcgccaagcaggcgatgtatcgttgaggcctgatcgggaaacagctttctttcgttttcactgagcggcagagcgctactggccttacctaatgattccgttaatcgcgcggcagctttcccggtcggggcagccaattgaatacgcaatcttttcacttcattcaattgcaccagcgccgttaacagcttggccaccgtagtcgtttttccggtgcctggcccgccggaaatcaccgaaattcggcgagtcacggcaacagccgcagccaccttctgccaatcgatttcactcgatgacgaaccaaacaggttatccagaatccctcgtaaccgtttctcatcgattggttcattcacttcatcacgggcaataaaatctgctacatcgccctcactctgccacatacgctgcaaatagaggcgttcctgctgtaatactaaaggcgtaggtaaagagccatcactgattgcatccgaattttctaacgcagcctgcaaatctgcagcatccggttcgccggcagcttgccataacgcatgagccaaatcgggctggcgcccgcaaaacagtcgttccggatgcaatctatctaaaggcaggcaaacgtgcccggctccggtttcagcgcttaaatatgctgctactaactggattaaaggagaattatcagtggcaatcatccgtgcaaactgaacgtctaacgggcgcaatagtttgtcgctaaccgcctgttccagcagcgttatcatactgactctccttctacgttcacggattccccgctaaataggcgatccattccttcaaccaaggcgatatccggccgacagtcaaaaacgccgtttccgggtttttggctgtcggcaccacgtaaaaagagataaatcacgccgccaaagtgccgctgatactcatagtcgggtaaacgatggcgcaaataacgatgcagagccaaggtatagagctgatactgcaaatcatagcgatgttcagccatagcctgttccatcgcctctctggtataggcgctgctatcttcccccagccagtttgatttgtagtccaacagataatatttaccctgccagcaaaataccagatcgataaaaccttttagcattccttgaacctgctggaaatccagcttggggcaacgggcggacagagggtcatagtacctgaccaaagcatccagttcatttggctgcaataaacgctcgataggtaggtaaaactgcagctctgcttgcttctccttcggtgataaatggctcaatgtcacgcctgtattgtttaacggcgtagtgaggatatcggtaatccattgatacaaaaccggttgccattcatcccctagcccctgctgctgtagttgctcagctaaccaggcttcgtcgaggggctgactgaagtccaaaggttccagtaaatcatgtaaaaaggttccaggcgcagcgcctcgcgggaaggtatgagccgtcaaacccgcttcttccgtaggcccttgttctccagcagcgtcggtgtccagcttcggtaatagctcctgaggtaacacatcgtctgccggaatactgatatttttggacgagccgtgttgttgtaaccccgaataactggttacacgccagttatcgaacattctgcgggagaaggtacgaccagccagctcgggcataggttcgttttgctgctgccactgacgatcatccagccgttcgaccacggtgaccgcaatatcctcatcggataattcagccagtttttcagccaggtaaacggcgtctcctgcctgcgcagcttgaaccaggtaaccgagagcactgagatgcatatcactctccccctgttttttccggccacctttaatgaggggagcaatacctatgctacagtgataaaccgagcgggtaagggcaacgtataacaggcgaagatcttcagctaaccgctcttcttcagccagttgcttactctcgtcactggcgttcaaatccagcagggcttcaaaattggttctatcgtggtacaacacatcctgttgctgcctgaaattgcccacaaaaggcaaccagaccaaggggtactccaatcctttcgacttatgaatggtgatgacctgcaccaaatggcgatcgctttcgagccttaactgttgattttccgattgatggttgggctgagcaatctgttgagccagccagcgaaccagaccatgctcactttctaactgcgattcttcttcctgcaataactcccccaaatgcaacacgtcagtcagccgccgctcaccaccagccgtagccagcagattttcagccaatcccctacgcgcaataagctcacgtagcatcggtaaaacaccacgtttttgccagtgttggcgatagcgatcaaactcctcaactaacgcatcccaagctttttcatcgtgattaagggcatctaacatctgcgcatccagccccagcaaactggtcgccatagcgctgcgtaatgccctttcttgctctggtgccaataccgcctgcaacaaccacaataaatccttggcttctggggtatcaaatacgctgtctcggttggacatatacaccgaaggaatagaaagcagacttaaggcatcacgtattaacgcagcttccgcgcggctacgcaccagaatagtgatatccgacgcttgtaccggacgcggcccatccggtgtctgtaaaatcgcctttccatgctgcccggcggttagccaatcacgaatctgcacggcacattggcgagacataagctgctgatattcactcacaccaacgccatcaccatgctgtaaccagaaatgcagtgcaggctgcgtaagaccctcaatctggaaatccaatacctggtttttctctgccgccgcaacttcaataaagggtatttgctcgaataaaaaaggcgctttaactcggctaaataagcggtttaccgaacgaaccatcggaaaagatgaacgccagttggtttccaacgtgtagtgagcattaacctcagagcgagcacgaatataggtaaagatatccgcaccacggaatgcatagatcgcctgtttgggatcgccgataagcaacagaccgcaatctttctggcggccatacagcgtattgaagatgcggtattgttgaggatcggtgtcctgaaattcatcaatcattgcaacgggataacgctgccggatagcgtcagacaacatttcaccgcccggctgctgtaaagcagcatccaaacggctgagaagatcgtcaaaaccgagctctgcccgctgccgtttctcctgctgaacactcattcgaatttcgctgatagctcgagccaaaatcaggtctcgcagcgttaagggttgttcaaacaaaacgtcaatcgcggtaaatagtggatgttcaggaaccgcaccttttttggttttttcaaacaaaactgtctggcgaaacttctctaattctttgggcaagagatagtctagggtttcctgctcggcccatagcccaactttctcaagccaattggggagatgtttactgctgtaactacgcttatcaacccctgattcgctaatcaaagcagccagttcatgggcgctttgacgccagaattcttttaactcatcgatcttcgtgatgacctgctgatgacggctgagaatcgtttcgtcatccccaggagtttgtcgcagcttaggcgcctccccctgtaaatatgcagataaatctttgagtaacgcttctggtccactccattcctgactcactaccgtggcaacagccaaaggcaatggataacagtgacgacgccaaaaatcggcacaggcctgccgccgcagcggtaattcatcctgaatcagtttttgttcgaacagaatcccggattcaaatgcgttattagccagcatcctctgacaaaaaccatgaatggtataaatcgcggcttcatccatttgccgctcggccgcgagtagatacgccgcagcagcgggtaaatccgtgatctctgccaataacgcccgatgcgcgggattactactctgccctcgcacacaggcgatacgtaattcatgaatattgttacggattctccccctcaactcctcggtcgctgcttcggtaaaggttaccaccaagattttctctacggtcagcgggcgtgggtaagcggagcttccccccaatccgagtaacaatcgtaaatagagcaatccgatagtaaaagttttacccgtaccggccgacgcttcaatcaggcgttcgccataaagcggtaaagtcagcggttcaaggcgttggggagaatttgtcatcatggcaccaatactttccgtggcagagtttgctgtaacgaggacacgttgggataagttttccaccctttaggcgcagcataactccccacatcctttccgttacctttaacctgagaaagcaacgcaagcccctgaggtttaatcactgcctgctggaaatagtcagctagctcggcgttattaattagccgaacctgagcgatcaatttatctcgagtatcaaaagcaaaattatttcgattaaagtcattactgaagcggctggcttcttcacccaacgtctgcgggcgttgcagcagttggttaatcagtccctgcttatactgctcgaaatctgctggtttcatatcccgcaaacgcttctcagcctgaggatagaaagcctgatagcgttgatagaggtacttaggttgcttgctattactttgcagcaagaaacctattccccattgacgccctaccgacatcgggaaggcaaagacggcatagcctaactgctcctcggtacgcaaccggtcgtagaaccacggttgaatgatttgccccaacaggttgctgtaagccatgcttttgatttcatcatagccagtaggaatatataccgcagccagagccgcatcagtgctactaccaattcgttgtaaattggccagctgcaccttatcaacgattacgtcttcgttggtccaccaatttgtgccaatgcaacccagctggtttttcagggcttcagctaactcgctaacctgtttaggtgccatattcccgatagccaggatttcaaccgcagactccttaagtaaactatcacggtaagcgatcacgtcctgcactgtgatcgtatcgaggagcttacttctttcactacgctcggtataaggcacgcgagaaagcatttttatcggctgaatcgccagttcaaatgcttttcctttatccgcaatagccagctgttcgcgataccaggatttagcctgcgccaactgctcttctgtcggagtgaagctggagtaccctacgactaaagaggtcaatagctgaggtaaacgctgagtaaaaccattggcattgacgtataaaccattgtccggcccggtcgagaagctaatgccaccgatagatgcctgatagctcaattgatcgagagaaagtgaagccagatagtctgtcagagcgaacaatacctgatgacgagcatcgtccagcgcatgttgattacggaatgcgagagagatatccgctttaggttcatcggcaaaatactggctaggcatatagaacacccgtaaacctggctgatcgacgattttctctggtcgggtcatttttttatcgacttcaaccaaagaaaaattatcaggaatataaggatttagcgtcggtaaagagagcgcgactttttgttctaaattttgccactctttcaactgctgcggcgtgattttgttcacctgataaggtgcatcaacaaagtaagccgttttgttatgtggttcatcagggctgatgtaccagattcgggcattttccggcgtcatttccgccaatcgtgctgcaatggctttaggatcaaaacgatcggccagataaggcgcatcaagcgtatgctcgaccggtactcgcagcatcatatccaccagccactcaatataatccatatcccgagtgatagatggataacggaaatccaggttcaatacatgtgcaatttcatcaaagtagcttttattaatgccttctttggccaacattttcagatattcaaaaatagccgcaacgactaaatctcgctgtgccagccctttatctgtcaaggatactgagattgaaaatactccaccgttgcgatcaaccataggatcggcccctgcgttgatcgagtcggcaagcccctgcttttgtagccaatcagataaggtgtttttgctacggttaccaatcagataactaatataagtatctgtcttgcttcgaaattcggcactattgttgtcgatgcgaaaatcaattttcagctgcttacgcggctgtgcgggaacatagtgaatgatgatgccggtttgctcagcggtaaccacaggtacggtgataggtggaaccttggcatcatgattaggaatacgaccaaacgtatctgccgctaactgagccagcttatccagaggctggttactataaattacgccaaccatcaggtttgcggaataataacgcttataaaaatctaacagttcatcgtgcaactttccgtcaggcttatctctcagcgtctccaaatttccaccggaaaaacgagcgctagggtgagccggattgagcgtttctgcgttaacttgcccaatgcgcataccgtcacgagaacgggccatagtcagttcggcattgaccgcgttacgctcacgatcggcattaatcggatccagcagaggctcggcaatagcatcggccaaacgttcgagcgcaggtgctaaggcgtcattttccacttccagataaaatgctgtgcgataagaagccgtgctggcattgtggctaccaccgtgttttttcaggaattccgaaagatttcccggttcagggaatcgcttcgaccccataagaaccatatgttcaaggtaatgagctaaccccaactgattatcaggatcttccagcgtgccaacaggcagcgccaaagcagccaaagacttaggcgcatcctggtcagaaaccaaaagtaccgtcataccgtcagccagttttattgcctgatatttgcgttgatcgtgttggcttttatgaatggtttccgctaatggttgccaacctgtcgaagcccagctaaccggcatccacaaccataataagaaaattacaccggcgatacgggtaagctgtttgtgcattcctttctcccatgaccctaaaaatatggcaccagaattttgtcgcgtttgttgagtaccaaacgtttggcacctagtttttccacaggctgatactcatcagcaaatctcaaaaaatgtaatatttaggacaataaaacaatcagttagcaaaaggtgaacagctaaataaaaagttcgaatactattgccatttactcttcaccgcccaattgttgttaaactcgattgtgctgcgcaacaggtaataagtaacgttccgtttcttgtaaaatcatcgccagacgagcgctgtccatgtggcggaaaactcgttgaatgtaaggatcttctccctctccagctatttgctgagatccctgccaagccaataaaagcttgttgcgggctttttcctgcgtgtcttcatcccacagaatttgtccagactccgcattaaaacactgactgagccaagcccagccacttttgctcaaaagcaataatggtcggctcattcctttttggtaaccctcgagtaatatctgcagattagcctgagcctcacaggcctccagaggcccaaaacgccatgcggttccttttcgaccatacattcggctttcgccctttccgcccgctgcacagtaaaccacgtgttcaacccaaagaagcaacccatccactgcggttagagccgctggccgccagcgaactaatccatcggcttgcacctgatgtatccagccggtgatagacatgttttccacagtgatatttaattcaaggctatatgtctcgcagcgctcctctctgacttgctcggcaagcaaggccatttcttcgagctgaccgcgccagtaaatctcgccaaatgccccgaaaggaagatcgccactcgctcgcgctctagcaaaaactttatcaacatctgactgctctactaatgcattcaataactgagtatttagttgataacggctgagattatccagcgtgaatggctcttcgtctggtaattccgtctcttcgatcacgaagttaacccccaaacgacgctggaaaaaggctcgaatcgggtgacgataaaagctggttaagtcatccagtagcagttcttgtactggctccggcgagagcggctgattaaaatcaggatgagccttcccctttgcgcctgcagcaggcaaccattccaccgcatagctttgcatttcactaccctgaataaagttctctatcgcgaagggtactcgcgcatgccagttttgtaagtgatcaataacctgttgtgcgctttcatccacgctaacagactcatcgccgggaagatggaaactctgaccgatatattcgatcaattcactcaccagtaccgacggatagcgcagactattatcctgaatcgaacgcccgatatagctgatatacagacgctgttgtgctgacagtagagcctcgaggaacagatagcggtcgtcgtcccgacggctgcgatctccacgctgaatttgtttagccatcaaatcaaagcccaacgggggcagagtgcgcgggtagacaccgtcgttcattcccaacaagcaaaccactttgaatgggattgagcgcatcggcatcaatgtgcagaagtttattggccctgccaggaaccgctgactgattctctcgttatccaaccgagaagccagttcttctcgcagtaaagtcaggggaacacattcaggatactgggcgctaatgccataaccgatcacttttaaccattgctgctcaatcagagcaagcaccgcttcagtttcattatcctgttcaaaaaaggtatcgagcagttggcgacatagcggcgaccattccgccagcgttcgcgcctcactcaattgctgcctccaacgactcagttgcatcagcatttcggctaattgcccaactatttctgccgccagaccactggcttcatcatatggcagaacatcatgccaatcgccggcctcactgctcatcgcgtaacccaataacatgcgagtcaatccaaagcgccaggtatgctgccccgtagccggtaacgataattcgcggacattatcatcatccagcccccaacgaatgccggattcaccgacccactggcgtaagcgtcgcagcccgtgttcatcaataccaaatttgttagctagggctggaacttccagtagcgccaatacctgctcggaggtaaaacggctttgaggcaggtccagcaaggtaatgaaagcctgcagcgcaggatgtgcctgactggctttccgatctgagatagcaaaaggcaggtaacgatcggcagaaacattaccaaaaaccgcctgaatataaggcgtatagctatctatatccgcaaccatcacaatgatatctcttggcgtcaaactgggatcttcctccagcatggccaagagttgatcctgtaagacctcgacttctctttgtgggctgtgacagatatgcaggcagatagaacgatcagacggatccaaaagacgttttttatcgctggaggctaacgtttctggggttgtaccaataacggcgtgatcttctagctccagcatatcgtgttgaatcgcgtgcagcagattatcaggctcaatatcgacaaaagcatgtacctcttgaatctcatcgacctgagataacaaatacatatggtcgcgccccaagcgtccccaagaagccaaaagagggttacttagctcttgctccccttcctcgttaaacagtagtgcagcattctccggctcacggaataggcttaactccagtttttcgcgataatgtcgacgtttacggctctgcaactttgccagaaaagcgtaattctggatatcgccccaaaaatagcggcaaggattggtgaacatcaggtgaatatcaatatgtttacctaaggcttgcaacgccgacaggtagattggtggtaatgcagaaataccacagataaagactcgtttaggcaaacccggagggcaaacgtcggtttcaagtaaggtgcgaataaaccgttgataaagattggcacgatgccattctggctgctgaagctgacgtgtatattcggttaaagctttccaaagcggagcctgccattcctgagcctcgtccagaccgtcgactctaagcccttgctcccaagcctccagccacttgggtcgatataccaaatattggtcaaacaggtcagcgacccgcgccgctagctgataaatttttcgtttatcgccatcgtcactcaggtagcgctgtagcgacgaaaagacgggttcgtttagtaaatcgggaagtagccacatcagtttccaagtcatggcatctttgctgaaggcgctttctttcggtatgccaggtaataccttagtaaacatatcccagatgaatgttgcgggcagcgggaactcgatattagccgcaatgctaaactgttgtgccaattgcatctgtagccattgcgccattccggggctttgcaccaaaataacttccggctcaaagggattatccaacggatctctttctatcaatgccgtagtcagcgttttgagtaaatctaattgattagaatgataaaccgtgaacatcgcgactcccaaatggcgcatataatctataggtcaatcgggtcattcctgatgaattccctctagtacccaatactctagcctgacatagcctaatgtaacaggttataaacctataagagattcataaccccttacttccccgataacagtaaagccgataaagctcgactcgctgtcgcagcggcgtaaggatctcaacgtttaacctctcgcacaagtcatcaacccgcgtaatcacactgttatgttgccagcctgtacgttgccagcctgtcttcggtggccacgtcattgactctgcaagttccctggtcataaaagactcggtttcatactgagctaaaagccacgcctgttttccatgccattcccgataaaaaccctgcaacaatatttggtgatattgcaatactccgagtaaggaaactgacaataacaaaaccgctatcatgacctcaggtaagctcaaaccctgctgactgttttgattgatgaaccgcctctccatggtcttatttttcctgctagaaattgctattagcctgagcaaaattccctctccttttccgggcaaaaatctagccaaccctgagcgataccaacaatatgatgtccctccggcgaaacttgcgcgttgtctggagcaactcgctgataaagatctattttgtgcccgtggcggttcccccccccttctccccttaatacgaagatatttggtgtaacactcgctttaatacaaaccctcaatgcttctgaaagatgctcctgacagtgccacaatcttttactctgccgggggggggctacctgatgcaaaggccatctctggcttattccccagctcagggcggaaatcgccaggttatagctacgcaggtaatgttgctcattacgactcatcagtagcagattatctaactgcctatgcatggcctgaagcaacaagaggctcagagcaaaaacgaaagtcatcgtcatcagtatggcgctaccgttctgcgaagattttctcataggttgtaacctcggactctacgctgcaactcttgccgtatctgcgttcgcttccctacctgcccagataagttaagggttaagagatttccccttaacggaatatattctcgttgtacgtcaaagccagtgacaaaaacttctgttgcatcaaataacctttcccacccactactttgacaatccgtttccccgcgagcactttccagctgatttttacgtagtcgatagccaaaatactcggaatgcttatgccttatcccctcccactgaccgtttcgattcaggtcgtaagccacaatgacgcaagaattggctttctctcctgaatactgccccagaaacaaccgcttcccttgacagaacccattgcagaacccggctcggcgcagatctttttcaatgattgagagaacccgttgcattgataattcaagccgataatgctgataaactgccgtcagccgctggcgtagttgcggataaatattcacactgcttaaaaccatcatgctgccaaatatcaaggcaaccatcacctccggcaggctgaatccgtcagggaaacaacaaccgaaacatcggcttcttttcgttcgaaggttagggtcagtgactaacatagtggtatccgaaactgagcatgtttctctccgcacaatctgattcgtccatgattcgaaataactaaccgaatacgacctgccgcattagccagaataattcgccccggttgcgcagtgttccttaggccataaaatccaaggctctcaggcgttaactcaaccaaagtaatacctgagtaatcgggcgtgaataaccatccatcctgcgcctgacacccttgtaatggctgctccccgctaccaatacaccaggtatcatcgaagctgtgccagagcaatgccggcctattcaaccaaaaagcgtcagcctgcaagcgagttaagaaacctagtaactgccgagcggttatctctagcctctcccgctgctgataatggctccaatgttgaaaactgctgactgagatgtaagcaagcagagccagcaccagtagccattcaatcaggctaaacccgcgttgtttcatacatacatgagttttcatccggcgagtttaaggaaatcaccaaatgaagccagaggtagaatgagaagtctggagaggctccgcaacctctttaacggtggtgtaatggcggctgtcaatctgcgtagcaacacgcatttctaaactgaaaatgaaaataagaaggtctggggagaaataaaaaaacggagccgtttggctccgctctgttctgagactcatttattaaacaagtcagttatagctgttgtattgacggttaaatagctattggagctttaatccccggatacggatcgtagccttcaatttcaaaatcttcaaagcgatagtcaaacagcgactcaggtttacgcttgatcaccagcttcggcaaagcacgcggctcccggctcagttgcaaatgagtttgttctatatgattgctgtacaggtgagtatccccgcccgtccagacaaaatcgccgacttccagctcgcactgttgcgccatcatatgcaccaacagcgcgtaactggcaatattaaacggcaaaccgaggaatacatcgcaagaacgctgatacagctggcacgaaagcttgccatcggccacgtagaactggaagaaagcatggcacggtgccagcgccatttgatccagctcgccaacgttccaggcagaaacaatgatacggcgtgagtccggatcttgttttagctgctccacaactttactcaattgatcgatttggcggccgtctgccgctccccacgcccgccattgcttaccgtataccgggcctaaatcaccgttttcgtccgcccattcatcccagatagaaacgttattatccttcaggtaaccaatgttggtatccccgttcaggaaccatagcagttcatgaataatggaacgcaaatggcaacgcttggtggtgaccagcgggaagccttcctgcaaattgaaacgcatctgatgcccgaaaaccgacagagtaccggttcccgtacggtcagcttttggggtgccctcatcaagcacttttttcatcaaatccagatactgtttcatgtcacctcacgaaagttgttgctgaggacggcggtacgcccaaatcatcataataataccggccacaatcattggcacagacaaaatctgccccatgctgattacaccgtcgaacaggccaagctgcgcatctggctggcggaaacattccaccacaatacggaagaagccataaccaatcaggaatagccccgacacgctgcccattgggcgcggtttgcggataaacagattcaggataataaataggactacaccttccagaatcatttcatatagctgagacggatggcgtggcaacactccatactggaacagaatgctttgtaactgaggatcggtcgctgccagcgcaatatcttcactacgtgaggttgggaacaacatcgcccacggagtatccgtggttactcgtccccagagttcgccgttaataaagttacctaagcgaccggcacctaaaccgaatggaatcagtggcgctataaaatcggaaacctggaagaaatggcgttttgtgcgatgggcaaaccacaacatgacgcagataacgccgaccagcccaccgtggaacgacatgccgccatcccagactttaaacaggtaaagcgggttatcaataaacatcggcaggttataaaacaggacatagcctaaacgtccgccgacgaacacgccgacaaaaccagcatacaataaattctctacttcatctctggtccagccgctgccaggcttgtttgcacggcgaaccgccaaccacatggcaaaaacgaagcccaccaaatacattaaaccgtaccaatggagagacaccggcccgatggagaaaatgatcggatcaatattaggaaacgccagatagctgttgctcatctatcaccacaatatgtctaggattttccccaaattgggggctgcagggagcgcatgatagcataggcaggcgacattcaggggaacggcaaagggaaaagttctgtaaacaatgacggcgaatattcccgccgccctctgactgctcagctattttccgcctcgaatcagcccgcctaaaccgcggcgttccataaatgcggcagttaaatgacgcacatcggtggtcatttgcgccgtcaatacacgctctgccaaagcttccgcttcggccagatcaacattacgcagcaggtatttaattcgcgccacgctgcgcccattcatactcaaatgacgatagcctagacctatcagcagtaaagcgcccataggatctccggccatttcaccgcataaactgacctgtaaaccggaatcggtcgcctgcaccagtatttgccgcagcacttgcagcatagccggatgcaaactgtcatacagcgaagcaactcgcgtattattccgatcaaccgccaacagatattgtgttaagtcattggtcccaaccgaaataaaatccacccgagatttcaggtacggcaacataaagatcatcgccggtacttcgatcatcacgccaaggcgcggctttggtaattcataccccagcgcttcttccacttcccgtccggctcgatcgatcaagcgcttcgcttcatccacctcttccagactggtgatcattggcagcaaaatccccagattgccggtaccggcattggcccgtagcatcgcccgtacctgaatcagaaagatctccggctgatccagcgtgatccttatccctcgccagcccagacacggattttcctcgcttatcggcatataaggcagctgtttgtcagcaccgatatccagcgttctaagtgtgaccggtttttgcggataaagctgtaacatgccctgatactgggccacctgctcttcttcggaaggaaagccgctctggagcataaaaggaatttcggtacgatacaggccgacgccatcgacgcgcccgccgagcagttgctcatgttccggacttaaacccgcattgagcagcacctgaatacgttcgccacttttcagctcagcgggttgctcaacatcgtcttcggccagcttgctcagctcgatttcttcgttaaccagacgctggtattcctgcaccagcaccggctctggatccaccagaatctcgccgcgatagccatcaacaatcaataatctttggcttaatagggaaggctgaatatccgcacccattacggtaggaatacccatggcgcgcaccagaatcgccgcgtgcgaatttgctgcaccatcgcgcaccactacgcccaccagacgatcctgaggaacttcagccaacaaagtggcggttaattcatcagcgaccagaataaaacgctcaggccactggctcgcgccggaggtgctgtcatcgagatggaagagtaaacgctgccccagagcacgcagatcgccggctctttcacgcatataagtgtcttgcaggctggcaaactgagcagcaaactgctccacaacttgcttgaccgcccattccgcaacggaaccggcgtcaatttcagcaaacaactcccgcttcaggcgagcgtcgtttaataagtgggagtaaaggtcaaaaatagccgcactttctttctgggaactagcggcaaaacgcttactgaaacgacgaaactcggccgccgcttcttccaatgcctgagttaagcgttcacgctcacgcgcgctatccaaggttgaggctttgtaaacctgatccagtgaaggctgggtagtgtcctgccaaccttctgcaaccgccacgcccggtgcggcagccagtgcccgaatgcgagtttgacgatattgaccaaaaatagcgttgagctgagattgagacagaatggccgccaactgtgtggccagcgtgaccataaatgattcttcgctttcatcgaattgacgatgttctcgctgctgcaccaccagcacgccgagcaattgccgacgataaataatgggaacaccgagaaaagcgcggaagctatcttctttaacctgcgggacatacttaaaactggggtgactttgcgcatcagccaggttgatcggttcggccagtcgcccgaccaatcccaccacaccttcatcaaaagccagcgtaatagtgcgaccccgaggctttttcaaacctcgggtcgccattaggtaataacaacgacggtcattatctgccagataaatcgagcaaacttccgtgttcatcgccagacaggtttcattgaccaacagctctaacgcatccgtcaggctggctgccatcgcaactttctctacgacttctcgtaaacgcgtgagcatgattggataacttaacctcttttccggcgataagcgggtggtgtccgcggcggagtcacctcctgcatcggcatcactgtagcagcaaattccttcatcacgcggcggtagacatcccgtttgaatgacaccacctgacgaaccggataccagtagcttacccagcgccaaccatcaaattctggcgtgctgctgcgctgcatattgatatcggcatcgttacacattaactgcagtaaaaaccatctctgcttttggccgatgcaaaccggctttgtatcccaacgcaccaaacgtttcggtaatttataacgcagccagttacgggttgaagccagtattcggacgtcctttttattcagtccaacttcttcaaacagttcgcggtacatcgcctgttccggcgtttcgccagggttgattcctccttgaggaaactgccaagagtgctgaccgtaacgtctggcccacaacacctgcccctgcctattacaaattacaatacccacgttcgggcggtagccatcatcatcgatcaccggactacctcgataagcttaatactcaaagatgctctgattgtttcacactaccaacaggcggtaaaccactgcttatcagtgattgaaacaccatgaccttgggataactcacagatattggcaaagttataaacaccctcggccaggctcggctaattttattcactttttctgtggatatatgtgtgcagaactcaggggtaagacgggtacaactcattttaagtaaattatagacgaataacaaaaaacaaattaaatcatatttttcatcaaattaagttatgcacagggtataagtaaagtgcaaaaatgtgatctgtatccgtttatgatccttggctgattaaagatccaccaatgcggtttttatccacagataatgcggctaagttacacaaaaaatggctaaactcgcaaaaaaaccctgcgtcaaggctgtaaattgaaccagtattcatgtttcaaccaggttatcccacaaatctgtggataaataggtgtaagatcctgttcattgttgctggcagctagtgtacaaatcgatgaaaacaaaatcacagcccggtttaagtgctaaaaaatcactgttaaatcatgctattattaattttcattcacagcgataattaaagttcgctgcggtgtattaaagcagtgcattttttaacccatcctgatgagttttttcactatgtcggtttattcacaacccccagcaccaccggtagacgaacaacagctcgtggatcgcgctcaggcgctggcaggcttcacgctaggagagcttgccgcccgggctaactggcctattcctgcgaatctaaagcgtgataaggggtgggttggtatgctattggagttttatttaggtgccagcgctggcagtaagcccgaacaggattttgcagatattggcatcgagctaaaaacgatcccaatcagtgcgcaaggtaaaccgttagaaacgacatttgtgtgcgtcgcgcccttaaccggaaatagcggcgtaacctgggaaagtagccatgttcgtcataaactggcgcgagttttatggattccggttgaaggtgaacgacaaattccactcgccgaacgtcacatcggcgcgccactgttgtggagcccaaacgcagaagaagaagagctgctgcgccgcgattgggaagaattaatggatctgattgtgttaggtaaggtggaaagtatcactgcccgccacggtgaagtattgcaattgcgtcccaaagcggcgaatagccgagccttaaccgaagctatcggcgaaaaaggccagccaattctgacgttgccgcgcgggttttacctaaagaaaaccttcaccgcgcccttgctggctcggcatttcctgctttagagattgttctgagccgtactgaggttatgatccattaataacagcgtataattacattcttgtattttttaaggtgtgtaaacgcaatgtttgaatggattgccgatccaaatgcctggctggcactgggcacgttgacgattctggaaattgttctgggtattgacaatattattttcctttctctagtcgtagcaaaattacctaaagcccaacaaaacaaagctcgtcgcattgggctggccggtgccatgctaatgcgtttggcattactggcctctatcgcctgggttattcgcctgactaatccattatttacggtgatggaacatggggtttccgcgcgggatctgattttgttactcggtggactcttcctgatttggaaagccagtaaagaaatccacgaaacggtagaaggcagcaataacgatcatcagagcaatgtcagcacgttctttggtgccatcgtacaaatcatgctgttggatattatcttcagcctggattctgttattaccgctgtgggactttccgatcatctctttattatgatggcggcggtggttatttccgtgggcgtgatgatgtttgccgccagacctattggcgaatttgttaaccgtcatccttccgtcaaaatgctggcactggcattcctgattttagtggggttcaccctgatgctggaaagcgttcaaatccacattccgaaaggctacatttacttcgccatgttcttctctatgggcgttgaaacgctgaacctgctgcgcagcaaaaagaataaaaccaataatatttaaacctaatttctgcgggtgcaaccttatgcgcccgcatcactcttttttgctcacattcatctcatgcccttcccccgtatctacggcttcgatatagtcggataaggccgttttattttcgcctggtaatttcggacattaaggaaggtcggcaatgcaatatcaccgtatcccccacagttctttagaagtaagcctgctgggtctgggcaccatgacctttggtgagcaaaacagcgaagccgatgcccacgctcaactggattacgccatctcggcaggtgttaacctaatcgataccgccgagatgtacccagtaccgcccaaacctgaaactcagggactgaccgagcaatatataggtagctggcttaaagcccgcggttgtcgcgaaaaagtgatcctggcaagcaaggtttctggcccgtcacgtggaaacgatcaacccattcgccctgcgatggcattggatcgcaaaaatatccgcattgcgctagatgccagccttaaacgcctcaataccgattatctcgatctctatcaattacattggccacagcgggaaaccaactgctttggcaaactgaattaccgctacgcgcaggaaaccgccacggtcacactgctagaaacgctggaggcactggcagaacaagtccgcgcaggtaaaatccgctatatcggcgtgtctaatgaaaccccttggggtgtgatgcgctatctgcaattagcagaaaagcacgacctgccgcgaatcgtttctatccaaaacccttacagtttgttaaatcgcagctttgaggtaggtctggctgaaatcagtcagcacgaaggtgtagagttactggcttactccagcctggcattcggcacgcttagcggtaagtatctgaacggcgccaaaccacctcaggcacgtaatacgctatttagccgctttactcgctactcttcgccgcaggcacagttagccatagccgaatacgtggcgctggctaaaaaacacggactggacccagctcaaatggcgttggcttttgttcgtcaacaaccgtttgtcgccagcacgctgcttggtgcaaccacgttgccacagttgaaaagcaatctggatagcctgcatctgattctggatgaagaagttttgcaaggtctggaagaaattcacactcgttatactttccccgcaccttaactgtagcagtggtcgctaaatgcaaaaaggccgtcacattggacggccttttctatataaaattatataattatatcagcgtcgtttttgccaccactgccatacccacagtgacgctatagccaaagcgaagatgacaccgaacccaatgcctacggccaccaccggtgcacccagtttgattaccagagaatacagcgccagcatcaataacatcgcggtattttcacctaaattctgtaccgcaatggcattgcctgcgcccacgctgtgttttccacgctcttgcagcaatgcattaagaggaaccacaaagaagccgccgagaatcccgatcgtcaccagtaataaataagccatcggcatactctgttgcaaagagaatgccgctaccgcaacgccgatcaaaaccccggcaggcatacagcgtctgaccgttttcagtgtaacaaagcgcgctgccgccgctgcgccgatcacaatccccaccgctaccgttgcgttaaggatcgtcggcgtcgcgttatcaatgatccccaatgccaccggaacccaaagtaccagtagaaaacgcaaagtgactcccgccccccaaaaaaggctggttccgaccagcgagaaacgcgtttccccatctcgccacagcgtcttacaagcggcaaaaaagcgacgactcatcactgtcggacgccaagattgtccacgacgggcggcggaaagacgaggaataaacaggttagcgaccaccgcagcggcgtaaaccagcgcacacacgcctaaagcgatactcagattccagtccgctaacattcctccagccaccgagccaatcaaaattgcggcaatggttgaagcctccattaaaccgttggctttcaccaattgatcgccggaagtaatttctcccaggataccgtatttagctggtgaataagccgcagcaccaatcccaaccaagctataaccgaagaacggattcaagccaaaacagatggctaacgcccccgctaatttcagagcattagcggtcatcatgactcgtcctttggcaaaactatcggcgaactgaccgacaaagggtgccaaaatgatataagtcgcgacaaaggccatttgtaaaatcggctggctccaatcgggataaagctgctgcttaatcactgccaacgtaacgaataacagcgcgttatcaccaaaggccgaaaaaaactgcgccgccaaaacggccatcattccgcgagataataatggcttatcatctgttgccccgtgctgggtcatgcttccatctccgggtgctccgccattttagccagagtgacaaaatcgggtttaccgctgcctagtaacggcaaagctttcaacgggcgaatatcgcgcggaacggctaactctggaacgccactttcccgcgccgcggcggataaacgttcacgcgtcatattgctatccgttgtgaacaacaccaatgcctctcctttcccactatcggattttgccgcagccgcgtgttgataatcaggagaaacccgcagtgccagctgttcaacgctttccagagacaccatttcccctgctagcttagcaaaacgtttcattcggccacgaatagtgcaaaatcctttttcatctattgagacgatatcaccggtgtcataccaaccgttctgtagctctccatcagcattttccgctaccggtggctccagcacatcaggtttttcaacgcgcagataacctttcataatatttgggccgcgcaattgcaagcggccaccctgttcaattccaggaactttgatcaatcgagcttccatcgtcggcaaaattcgcccaaccgtaccgactttagccgccattggcacattaatcgccaccaccggcgcgcattccgttacgccgtagccttcaaggatgcgaataccgaatttatcctgccaaatctgtttggttccttccgccaatttctctgcgccagcaaccacatagcgcaagcgggcgaaatcataaggatgagcaaaacgagcgtaattaccaagaaaagtcgaagtaccaaacaacacggtacagtttcgatcatagaccagttctggcacgacccgataatgcagcgggctaggatagagaaatacccgactaccagtcattaatggcgtgaataatccaaccgttagaccaaaagcgtggaacaacggcaatgacgacataaagcgatctcgaggcgtaaaatcagcaatagtgcgaatttgctcgacgttggcaagtaaacttccgtgagaatgcacaacacctttgggatggccttccgaacctgaagtgaacagaatcagcgctgcatcttccgctttctgagccaccatagcgcgacgagggagaaagagatggaatagaatccagagtttatccgtcagactaaccgtatcctttaaatcctccagatagacccaatgggcctcgctcacctgttcaggtaaatgagttagcttccctttctcaaggaactggcgcgacgtcacaatggttttcaggctggccgcagtcatggcacttttcagccctttagcgccggaagtgtaattaagtaaagccggaatacgcccactcagtgaagcaccgaaaatagccgcggcggtaatagttgcgttaggcaaaagcataccgactcgctcacccgattcggtaaaacgttgtaatatccggctcactcccaaggatttctttaataacgtctgataactatcttctttaaaagcgatatcttcgatacacggcttatggcgaccataacgatctctggcagacagcaaagcttcgaacagcgtttcacgtgggattatagccatacgtgccgccatcataatctcatgaagcttttctcctgccagtattcggcgttctttggctctgggtgcctcaggcatcggtaattgggttgctggcaggacgtaaatactgattttggggaaccattgaagctttaatatcccccccaggcggccaaagtgactcaactcaggcccctctaaacgcacgggaataactgtcgcacctgatttcgccgcaataaaggccgcaccatcataaatcttcatcaatgaaccggtcacggtaatccggccttctgggaaaatgacgacgggttttccctgctcgaccattcttactaactgcttgatcgacataggttttgctggatctagtggtacgaaatctacgtaagactttagccaacgcatataccaactttccgtcacgctggaatacacggcaaacacaggttttatcggtaagaacaacgccaataatattccatcgagaaatgaaacatgattgggagtaatcagaattttttgatgggagaactgatcgccgataccttcaatggtgacgcgaaacagtcgacgaaaaagggcgcgcagtaagcggagaatcatatccatttctctatcagtcgatgagtcagataaatgcagaatactataatcacagcatttattccgctaaccaacgtaagagaatctgcatggaaaaaagaataaaaaaaaaacctacgtatctacgtaggtcggtgtaaataaaaaactggctctaacacacagcgtatgttgattactcaccaattaatacctctgggatatcaactgtaccgacttaacccaaagctcagccagcaaataatcgcaatatttacgcgcaaagtgtaaccagcaatgaactttgtcagaaacaagatatatgctgttaattcatgtaactacggccatatttaaggctgaagttaccggcttctcatcaactgtatccctgccaattgcgccattattataacgctctgacctccaccaaacagctcattgcatttgggccctgcgttagtggtgacgttcctatatccaaagttaatacattcgggtttccagactgctctatctgatgccgctgttggccaaaaccgggatcaaaccaggctccagtcgccatcaaaacgacgcctctcgtcacaccgtccgtaatgctcacaccggccagacaactgccgcgagcgttgctaaccagcacttccataccttcggtaatagttcgtgtagcggcatcatctggatgcataaataaggtttcgtgtccggcagttttgtttgattgcgccagcggcgcgggatcaagctggctgtgtagccgatccgctggctggattgagatcaaatgcaatggccatttttcagcatcgacactgcccaaccactctaccggcggtttccattcagcgtgaggaccaaaatcttcatattgatagcccgcaattttctcactgaacaattctattttaccgctgggtgtctgtaagggatgcgcctgaggattcgaacggaactcatcgaagaaaacgaactctttctgcggggcaggcaagccaacatagccctgccgccagaaatcctcaaagtccggccattccacgccttcggcacgctgcgctacaccgcactgttgatagatatgcgcgatccacgccatttcatcccgattttcagtgaaagcttcccgataacctaaacgttcggctaaatcagcaaaaacatcaaaatcgtttcgcgcctgatgctgcggagctatcgcctgatgcatggctaaaacataacgatcgcgcgaggaaccaccaatatcattgcgttccagagagctggtgatgggtagcacgatatccgccattttagccgctggcgtccaccagatatcctgcacaataacggtatctggcttttgccaccctttcactagccgattcagttgctgatgatgatggaaagggtttcctcccgcccagtgcactaagtgtatatcggggtaggtatgggtttccccttgaaatgagtaactctgccccggttgaagcagcatatcgcaaattctggcaaccggaattgccagcccggacggatttttacccaccgacatagtcggtgccggtgtatctatacgcgggttcccaacgccattcattgagccgtgcccgaaagaaaatccgccgccgggtaagccgatttgccccaacatcgccgatagcgcaatcatcatccagtaaggttgctcacctcgatgagcgcgctggatggaataagaacaagtgataaaactacgtacaccaatcaattgcagtgcaagttttgcaatgcgatcggcaggaataccagtaatctggctggcccactccggagttttggctacaccgtcatgagtgccgcgaatatactccgccaactgctggtagccaacgcagtgactaagaaggaaagccttgtcttcagcaccacggcgctgaatttcataggccagccccagcatcagcgcgacatcagtattcggacgaatgggtatccattccgcatttacgaattccgggcaatcatcacgcatagggctgatattcacgaccggagtgccttttctcaccagtttttccagccagggcttgagagagtgctccgcagcaccaccggatgatacctgcgcattttttaacgctaaaccgccaaaagcgataaaaatctcgcagtgttccaccacacttggccaggaagtcactcgtccagtcagtgggctaaacgttccaatgacgtagggcaggaaaaactgagccgcaccccaactgtaattacccatttggtcaacgccgccaccgccgctaaagtaaaaacgccgaactagcgaacgagcgtggtgtactcgccctgcggaagaccagccataagaaccggtaaataggccagacgggccatattgctctctgactcggcggttttcttccgcaaccagatccagcgcaacatcccaatctacctcaacgaaatcttcccgcccgcgtaaggtacgatcgcttccctctcgtttctgcaaccatgaacggcgtaccgccggttttcggatgcgtttatcggaataaaccataggtacgatagagtttaatagcggcgaaggatcgggatcttctacaaaaggttcacaacgaatgagttttccgtcttcaaccacggcggtataagcgccccaatgagcaagctgcgggtaacgagtaatggtcatggcgctctcatatagatcagtaaaatagataaacctgcagatgaaaataccttcgccagctagctagttcaacgaactaattaagctaaacaagttctattttgcctaaccttccggtactcaccttaagtcgcaatagaaaatgctctcttttccgttttatttggttttatctggccaagttgcgatctctcccccttgcgagaagcatttttttccgcaaaactgaaggatgtaagcgattaccctaaaagtttatggaaaagaaatggccactattaaggatgttgccaaactggcaggcgtgtctgttgctacagtttcacgcgtaatcaaccaatcccccaaagccagtgaaagttcccgcgcggcggttttaagcgcaatggaacagctacagtatcacccaaatgccaatgccagagctcttgcacaacaatcaacagaaaccgttggcctcatcgtttccgatgtttcggaccccttttttggtgcaatggtcaaggctgttgagcaaattgcctatgccacagggaatttcctgctaattggtaacggttaccataatgccgataaagaacggcaagccattgagcagttgattcgccatcgctgtgccgcattagtagtacatgcgaaaaagctgcccgatgaagagcttgtttcattgatgaaacaaattcccggaatggttttaatcaatcggacactggcaggatatgaaacacgctgtgtcgctcttgacgatcgttacggtgcctggctggcaacccgtcaccttattcagcaaggtcataaacgcattggaattatctgttcaaaccaccagatttcagacgctattgaccgtcttcagggctatctggatgcgctaaacgagcatgatattcccgtggatgaaaaactgatcgcttatggcacaccagatgaactgggcggcgagcaggcaatgaccgagttattaggtcgcggcaagcaaatcactgcaataacctgctacaacgattcaatggccgctggtgctttatcagtacttagcgataacagcattgatgtaccacaggaaatctctcttattggttttgatgatgttctgatctctcgttatttacgccctcgccttaccactattcgctacccggtagttgcgatggcaactcaggcagcagagctggctttggctctggctaaccagaccccactccctgaaatcaccaacatgttcagcccaacgctggttcgtcggcactcggtgaccaatccgccaaatcgtacagaacatacggagtaacctgcacttatccctattatgttaaactgcgcgccctggatatcagactggctaagaggttagtgcttaatgattactatgctagatgtctctatacgtgctggcgtttcaaaagcgacggtttctcgcgtattaaacggcactgggcaagtgaaagaaagcacccgggctgcggttttcaaagcaatggacgaacttggctatcgccctaactttttagcccaatctttagcgaatagaagctcaaacagcattggcctggtggtttccaattttaacggcccttactttggtcgcctgctacatcaagcagccacgctcaccgaagccagcggcaaacacctgatcgtaactgatggccacgatacaccagaaggagagcgtcaagccgtccggctgttggcagacaggcgctgtgacgccatcattctctatacgcgttttatggctgaggctgacctgatggcgttacttaccagcctacccactccgcttatggtggttaatcgcgatttacctcaagcgcgtgagaggtgtgtattctttgagcagcaacaggccgcttttaacgccgttagttatctgatccagcagggtcacagagatattgcctgtatcactggccctattaatacgccgactgcgctatcccgtctgtctggttatcgtcaggcactggccgttcatgatattccttgtaatgattcgctggttgttcagggcgacagcaacgtggccagcggctattccgcctgtcatgaattactgcatcataatcggcatttcaccgctctttttgccagcaatgacgatatggcaataggtgctatgaaagcacttaatcaagctggaaagaaaatgccccaagatgtatcgctattcggttttgacgatgaacccagcgcagcctatctgcagccggcgctgtccaccgtatacctgcctattgacgcgatgatcgaggctgcgataactcaagctttaaaattaatcgatggcaaaagcgttaatcccttatcacctttcatcggcgagttaaaaattcgcgaatctgtctctcccggcccctataaaccctaagttactgttagacaaaaccgctcgccataccttattcgccaagatgcgaggcgtttcgcattctttatcctgacatttcccttgggataaaaaatgcttcattctgctttaaaacttggccaacctcatatttcacaggacgagaatggaggtattaatgtttaaaatcattggattgagaaatacaaagcggctaactcacattcgtgacggagaatacctgagcaatttaaggctctatcatcaacagcgcgggtattcaaaaatatcagggcagaatcatgcagggaaagggagtgggggtttgcaacgcaaggctcagaccgccaacggcagcctaagcatcagtcttcgccaatctttaaagcatttccaaggcaaccagttcttcgatagtttggcggcggcgaatcaatctcggtttcccattttcaaacaaaacttctggcagcaatgggcgactgttgtaattggaagacatcgacgcaccatatgccccggtatcatggaacaccaaataatcacctattacagcccgggccaaagctctggtttccagcccaccgccagcttgctgagtaaatacgtcaccagattcacacaatggtccggcaatcaccgaatcaatcaaaggctcattggtaatatctctgccatcggcaggtaataacgaaatatggtgataactaccgtacatggcgggtcgcatcagatcgttaaaaccagcatcgactaatacataatgacggctacccatattttttaccgccctaacctgtgcaaccagaacgcctgattcagcaacaagaaaacggccaggctcaatctcaaggctaattgggtggcctaaatgttcagcgatttgctgtctggctttattccataggccgtaataatgttcggtatcgataatatcctccccatattggtagggaatggataagcccccgccggcagatatcgcgctgatatcctgatccaattcgattacctgacgtaccatagcagcacagacttgttccaaatgttgataatcaacaccagaaccaatatgcatatgaatgccaaccagctttaacgagtatttttggatttcggctatcgccgcaggcagatcttgatgccagataccgtgtttgctgttctctccaccggtattagttttctgactgtgcccgtggccaaatccggggtttacccggagccatacgggatgccccggtgcatgctcaccaagctgagttagcatatcaattgatccagcgttaaccggtatatctaactcgacaacacgcagcagagtcgtctgatccaataaatcagcggtaaatacaatctctgcaggctcttggcccggctgaaaaccggctaacaaagctctttcaatttcccctaatgaaacggagtcgaccttaacaccctgctcacgcattaaacgtagaatatgaatattcgaacacgctttctgcgcaaagcgtatcacatcaaaattacgcaactgattgatacgttgtgcaataatatctccgtcataagcccaaaccgggcatccgaagcgcgcaggtaatgccagcaggttttcggcattcagggcggaggaagtatcagtcagagagagcggcatagggtttccttttgggtaaatctattctgattaatttattggctaactcattattagtcattcactttggcattcaaaatatctatttacgcacagtctattcatttatgatatagcatgaatgcgttgaaacagatcaaatcgccggtgcacaggagcgaataatgcccgctatttcattacgacaaatagagatttttcatggtgttatgacaactggcaatttgacggaggccgcagctctcttacaaacctcacagccaacggtaagccgcgaactggctcgttttgaacagttaattcaacttaagctttttgatcgtgtacgcggtcggctctacccaacggcgcaaggattaagacttttcgaagaggtacagcgctcttattacggtttagaccgcattgtgcaagccgcggacagtattcgccagttccaacaggcgcagctctcaattgcctgtttacccgttttttcacaatcactactaccggcggtgtgtaagccttttatcgatcgttacccggaagtgagcttgaatgtaataccgcaggaatcgccgttgttggaagaatggttatcggctcaacatcatgatttaggtctgaccgaaaatacacaaacgcctgcgggaacccaacgatatacattaatgacgctcaatgaggtttgcgttttgcctgcggaccatccattgcaaagcaaaaaggtgttaacaccgcaggatttcaacggtgagaattttatcagcctgtcggtaaccgatagctaccgacaattgctggataatttgtttaatgaagaaggaattagtcgccgtttagtgatggaaacccacagcgcagcatcagtttgttcaatggtacgagaaggcgtcggcgtgtctatcgtgaatccgcttaccgcactcgattatgcggcaagccatcatgggcaaggcgtttgcgtgcgcccctttagcgtcgaggttcctttcacggttagtctagttcggccattgcaccgcccctcttccgaattagtcgacacttttattgctcatctaaaacagcaggtaacacgctttaagacacgtctgaccaacgtcattacccgctaacttggttaacaccagcgagtcgcgaacgccggaaagtataaaggcacaagaacagcccaagcagtgcaagcaatgcagcagctaaaggcactgcatttaatcctaagccttgtgcaataaccacaccgccgacccaggcacctaatgcgttacccacgttaaaagcagcaatattcagagtagaaaccagattaggtgcttttttcccataagcgacaacgttgatttgtaacgctggcacggcagaaaatgccgccgcagaccataagaacaaagtcagttctgctgctagcaatgaataactgctccagctaaataaggcagagaatacggcaatcagcaaaaaggtcatggtcaaactcactgacaagcgccagtctgctaaacgaccaccaacgatattcccaagagttaaacctaatcccatcagtaatagcgtccaactgacgccagaggcggaaaccttggttacctcagtcaataacggtgcgatataagtgaacagagcaaacatagaggcggcgaataacactgtcatcatcagtgaaagccaaattcccgccccgcgcaacgcagcgatttctttgcataaatccgtaggtatttcatctttagaatcagggagtttggcatatagggcgaacaatgataacagcccaatcgcggccacaacccagaaagtcgattgccagccaaatgcctgccccaacgctgttcccagcggtacgcccaacacattagccagcgttagtccggtgaacattaatgctaccgcggaagcccggcgattaggcggcaccaaattggccgctacgacggcaccaataccgaagaaagcaccgtgacataacgcagtaataatgcgagccagcatcaaaaaatcgtagctgaacgctaaagcgcacataacgttgccaattataaaaataaccattagcaacaatagcgtctttttacgcggcaattttgccgttagtaccgccataataggcgcgccaatggctacgcccagagcataaccactaattaaccacccagctgttggtatagaaatatgtaaatcaccggccacctccggtaataaccccataataacaaactcggtcgtacctatagcaaaagcacttaacgccagtgccagtagcgaaacaggcatacaaaaactcccagtcaaaaatatccctcagccgttacgcggacggattaacaatgtaaagatcttatgctcggcctaaaaaaccgacgggttattgagtcgaaaagaatgacagaataagtgggagcgagtgtaggctcatcaatataaccttataaatttcaagtatttattttctcatcctgcgaaacagaagtaacatgaatgcaaatagaaaaaccagagttaagcgaaatcaatcaggtttgaaaaagagatcctaggttaactatatgaagatagtaataacgctttcctctgaacctgaatataaatatgttcgagaaggttactaactcgattcatttcatcatgccttgccattgttcactggtcgcaaaccactcaattaagaagtccagcagagttcttagcgttgtaggcatctgtcgccgcgaagtataaataccataaatgcccatcgcctgaggttggtaatctggcaatagctggactaaatcaccagcgataatatgtggcatagccgaataactgggctgaagagtaattcctacgccttccaaagctccgctgagcaggacaaccgactcattagcgctcaggttgccgctaaccggtaccgaagatttaatcccctcctgatcgaaatgccacaaacttttgccaaaataagaataggtcagacaattgtgcagagccaaatcctggggagtctggggaattcccttatttttcagataggaaggagcagcacagactacggaataacaggtagaaagcggacgagcaattaaattaggatctaattcattggtgatgcggatggccagatctattcgttcctcaaccaaattgatagcgcggttattcatctgtaaatcaatagcaacctgagggtaacgctgcaaaaatgccgcgacagcaatgcctagcgcagtttgagctaaggattgggaacaactgatcctgagtaatccacgcaatacatcgctttcgcccccatcaaccagatccatttcattagccaaagccagcattttccggcaacgctccagagtggtttctcccgcgtgagttaaactaagtttacgcgttgtccgatgcaataatctggcaccagcccattgctccatctgcgccagatagcgtgtcaccatcgctcgggacatctctagcgcttctgcggcagcaatcatactgccccgatcgacgatggctacaaatacttcagcggccgttactctatccataattagtcctatttaagcaacaaacaattgctcattatccggtttttattgcgtgatatgcaatttattattattcccgtacccagcagctaacagccaataggatgactaatatgtttactaaaacccttttacagatgacttttgccagcattgcaactttcggggctatttccaccgccgttgcagcggaaccgctgaaaatggaagtgtataaccctggcgagaaaagtattttccctgtttcttctgaaattatcagtggaaaaactgaggttgtattgattgatgctcagttccaacgtaatgatgcagaagcactgattaagaaaatcaaagatagtggcaaaaagttgaccaccatttatatcagccaatctgatcctgatttctacttcggccttgatgtcatcaccaaagctttccctcaagcaaaagtgatcgcaacaccgcaaactatcgaagaaattaaagaaacaaaagacggtaaaattgcgtattggagcgggattctgaaagataatgcaccaaaaactgtcattgtacctcaaccgttagtaggcaatagcttcaccgttgacggtgaaaaaattagcgtagaaggtttagatggcccatcgccagagcgtactttcgtatggattccagcactgaaagccgttgtgggtggcgtggcggtttccggggatattcacctgtgggccgccgataatcaaactgtggaatctcgcgataattggttaaaaacactggatgcgattaaggcattaaaacccgttaccgtagtacctggtcatttcctgggtgatgcgccgcaaacattggaatcagtgaatttcacacaaaaatacctgacaacgctaaatgctgaaattccgaaagcaaaagattcagcggaattgatttcggcgatgaaaaaacattatccaaatcttaaagatgaatctagcttggaattaagtgcgaaggtgctgaaaggtgaaatgaaatggccacaataattgccatctatcagagctgcagcatttaaagcattcacgaggaaataaatatgtccggtaccacattacactacattttcgatccactgtgcggatggtgctacggcgccgccccactggtaaaagcggcgcaggccataccagggctttccatcagtttccacggaggtggaatgatgactggagaaaaccgccgtcagataaatgcagagtggcgtagttatgttatgcctcacgaccagcgcatttcaggactgaccggacagccatttggcgatcgctatttcgatgggttgctgaaagatacttcagccatactagattcggctccaccaattaccgctattcttacggcagaaataatcgcagaacgcggtttagatatgttgcaccgtattcagcacgcacattattttgaaggtcgtcggatcgcagatacgccagtgttgatcgagttagctacagaactaggtttagatgtacagtcatttagcccagtatttcaggaaaccttaagcacggcgacggctcagcatattgctaatagcagagcttttttggctaaggtacatggccaaggtttcccgacctttattctacaaaatgaaaagggcgaaatgcagattattaatgctggacaatatcttggagatccagcgggatggactcagatgttaaatgaagctataccttagagatattacgagtctggttgattcatttattttgacaatcaaccagacaacttatttttgcgcaactttaagaatatagaataattttttggtaaaacgcatatcactttttacccgccccataacccactgtttaaatcgccacttatatacgaaaaaaaaatcatacaatctataaatataaaagaaagattcaggtttttttgcagttaatattattgactcgttccaatagtcttgccgttcccaaaggatgaccttgggattgctccataataaccgtattacaatccaacaagaaaaatagaggataacttattacataaggcgctttgagtaaattatttagctcttcatcattgctctcttcaggaaccatagagactacttttccattaaagatattcatcttgatatctaaaactctaaacaacatttcccgattaactttaaagcttgcatgatcatcataaatatcagcagaggtagtaatctcacgacccaaaatggtaactctggcattaagatggtactggtctaatggtgttttaattaactggtttacttcccaatacccctctatttctctcatgggattgaagtaggcatacagaaaaccaaagctactaccaataatcccacccaaaaatgcagatagaacacaaaaaccaattattttcttgtacataaaaactcaccgtccactcgcccacaaacgttatagcttccgtcactattttttttcaacataaggttaggatgcttacgataaagctttaaaaaatccgcgtctttcttttcatccagattaataagtataggcaaatcctgatactttactttgaagatgttaatctggtattcattaaagaagaaaacaaatgaaaaataaaaagccgcgctaaaagaaagtacaacaagcaataactgtgttaactggaaaggctttcttacattacgagaaattaattgagcgtcgtcattaattacctctagcactgtaggagttaattcattttcatcagcgttataaaatacccgtttaggctccaaacctaaacaatatcctttttttggtatagtaataattaattcatgttttttatcatttagcgcattgcgcaggttactgatagtttgcgtcaaggtattgtccgtaacatagctatcagtccagattgtcttttctatttgctcacgagagacagggtctggataattatcacacaatagagcaagaacttcggactctttatttctaagttttacctcattcccatcgtgttcaaccgctctaatcttaggggtaaaagtgatatctccaataaaaatcctatccattagtcctccgtttcaacatccatgccgctttgtcggcctgcttggacctgtcccatagcaatagaagtttcagtatggcattgaaataactacacaacccctaaaaatatcaatccatgaatgttctaacaaaaaatcaataaactataaaacaccacataagcgcaaaattcaatatagaaatccgaaaaatagatttttacatcatatatcacacaaaaacatcggcgattctcatgtaagtatcctcgcttcagttccacattctttttgaaatttccagtttatcggccatcagccggtatgcttttggtgtcagattatccggggatgcatggggccgctcaatgttatattcagccagcgatccgtcatttcccgtgcttcattcaacgttctaaataggcaaaatccagtatttcggtccagtacgtcttgttaaaacgtaaaacatccgataaacgcgttcagtgtcggcttacccggtttgatgaattctagccgcacaccatgggtcttcagcccattgtgcaaagccagtgatatcagttccaacccattatccatccgcatcttcagcggatatccacggttttcctctatcctgtccagctcgcggacagcacgctgcgcttggatagtcaggtcaatttcgatagccagagctgcacggttaacatcatcctttaccttgaagcgccgaaaacgtcgatcgcacaccaactcgtcgtgcataaaatcgatagacccgctctgattgagtactcccggcgtggcagcggagtcggattacgataacatagcggggatagcgctcagcattccagactcagatctgcaaccatctgtttcagaagatgattttatcctcaagatctttcatctttttcatatcagaggctcgcatcccaacttgcttggctctccagttgtagtctgaggcttcagaaaccccagctgcgcggcaggcatccttaacggtgcgtccggcttcgacggacttcagaacggcaatgctctggtgctcagtgaatcgggctttttgcatggtgaacgcctaaaaagacataattaatatgtcggtagatctttagaagtaaatggttcgttttgatggaatagggacagatccaaaggctgctcaatttctcccgtcagatatttatgagccaacattaaacagctacgaatatcagcaacgataccaagaatccgcgaaaacatttcatggattgaacacccggaattataatttgaaggagagatagttgaagagttttccaattcgccttctctttcagagagattaaatagtaatactaaagaatcgtgaacacttattgatgaacaccgaatcccaggggtgaactctatcaaacaagggctattccttcagacgtatctgaagacgaacaagccgaacgaaggaaacgctcaaatgtaggccataatgtaacaggaataatggctcgcaggtttgaatcctaacgtcagggtgaaatatatacaatcataagattaacaagtgagatagtcacaattgtgctggcagacagttttgacagtgaacaagatatataattgatagcatcaggggccaacccagcctatatcccgacaccaacagcaaatgatgccattcgagatgcaggtaccactggtgtcggcgttttggccaaatatcttaagcaaaaagtggcaagagcgttgatctcaaaagttatctcgcccccctcagctattgttaaagaaaaataggttttacttttaaaaaagaacgtttaattaagagctaactaatcgagattgcctacagctatagcgtcggctatcttatatttactcttgagaaaaaaccaacaacaactattaccaacagtttgttaaactcaatatcacagacaataatttattattgtaaacagaaaaaatcatgctttcggaatataaaaattctgaatatgagcaaagcctcaaactcatttaacaatcggcgcaaatgctatctatttttaattatagttccgcatctcacccccttaattcataccttttttgtattagcgtagctcgaccactttgaattttatacaatgtaatcaacttataattcccaacgtcattatctagcttaataatagacattagatatttatgttctatggatagcatatcacggaaatatgaagataactcatttctgatagtagagttaattccagtgaataacaggtttataaattcatcgactcctacccaacctccatccggtttactttttattacgttgattatgttatcttttggcaccttggagagtaacaatatgaatataagttcaacatggctttcatttatggagtttatatttatatggactttatcatcaggtaaataacagactctatttttatcaaaatttttaattttatgttccacattatttcgccccagaatatctataagatattttgagctttcttcccaaactttctcgtcaacgccaagttttttagctatatagtctaatttctccctatctatcttagctttgtatctcaaagtataaaatgcgtttatattaaaacactctgtaatagaaataattgataaatttaatgcagtaccacccactattattttttcattcacaatcaatacttcatcactctcagcactcatatttatttttttcatagcaatgccttgcacacttaataaccattccttttctttatttatctccaacactcttttgtgaaaataaaagaatctactccaaacatcattcaccttcatcaaggctgaactcataagagaaattataattaaaacaaagatcagtgaaatacctgattgtttcttaattaacatttaatcactgccattcatcatgattattttattaatttcaccatacttatccagatctataataatttcaattgccatcggatgtttactaaattcattccagtaatcttgccatttaccttttgagaaaaacctaaactttatgcttttcactcctgttaatattcgttcttttatcacttcacctgatctctgaggataaaataacgcatcatcaacattaattgcgcgaattctctctaaacttttattattaatcttatatcctactttttccaactgatagtaataaccgacactatttacattaagtttattattcctcactatttcaatagtattggatacacctcctgatttaccaacaaagaaatcgataggaccattattagtgatctcttttggcgttcttactatcgcatgagttaaatcattctctatgatataaatagaatttcttatatcttcaagttcatctaaatgactgatcacatttgacgtcgttctcaatgtcacttgcaatacctggtacatggctaaactcaatagtgaaaagatactgattgccaaaatcacttctataaaggtgaagccattgttatatttcagaatcaatttatcaccctgtaatatttaaaatgtaagggagtatccatattattttcaattttcacttcaatatctattaacatcaaaccaaaatattcaacatcttcacttctggcgcgccactgccattttttctcgatcatatattcatcaccagagatccaatcattaccaggaggattgcgattaagtatcatttcatttaatttattttctgctattaacacagaaaatatatcactcttaacctggttatttaagtatatgctttgcgtcataaattgaagtatagcaagacctgtagtggaaaatataattaaggagaacataacttcaagtagagtcatccctttacttttttttattattacatctgaaatattcatgttcttgttatatttaaagaatagttattataatcaataacactcactccgtatttatcatacagatttattgacaaacttgattctggtaataatgggtaaaggatgaaataaaaaaaatgatgttctgagtttgcatctccccattcatcatacccagtcaacacaactttcatatctaacactgaattgccaaaatctctttttaatgcttttcttccataatatacttgctcccaggatttatctggccaaaacttgctctttgctattttattgtccccgttacattcttttaaacatagtttttctacagcccatccctttacatttattctaataatgtacacagtctgctcaaacttccctagttttcttatccaatctatagtggtatataaatgctcggcctcagtaatagcatcttttttatcatcctttattttaaaaatagctattacagacatggaggataaaataaaaattaccaacattatttctagcaatgtaaaaccataaaacctagttttgcgttccgctatctgcatgctcatttagccaattacctatatcatcgctagtgccgatttcaccatcaggacctttagataaaacatctatactgttataaaaaccaggattttttattatataactattaccccatggatctttcggcaacctacgtaaataaccaccagaccgaaaattctttggtaaaggctcttctaacggcatttccactaatgacttaattccttgctcctcggaagggaataatccattatccagcctatacatatctaaagcattttcaaacgtagcgatatcagtaataactttttgtatatcagccttacttttgtttcccataagattaggtatcgttaaactcgccagcaaacccaaaatgacgataactatcatgacctctagcaaggtaaatcctttgtaatatctactttttttacacataatcttttaaccgccccaaaataaattaagccatattgttaagtaacaatattggctgtaaaacagataaaacaataaatagaattaatgaagccattatgatgatgagtgtcggctcaaatatactcattgagatctctatgattcgttcaaattcctcatctataatatctgccgttttttctaacatgatatttaaatcaccgcttttctcgcctgaataaatcatatgtctggctaatggaggaaaaatattggtatgactcaatgcagccgaaagactcgctcctttttctaccaatgatactccctgtttcatttctagtttaattgattcgttagttaaaactgtcaaaccaattttcatcgattgcatcaaaggaatcccactagagcacagtatagccagcattcttatatagcgtgaagcatgtatctttttaatcactttacctataactacaatttcaagtaactttctatgaacatagaatttatattttaacttcctcataccaaaaacattaatcattaaaaaaatgacaatggatatcattaataatgaaaaataactgctcataaagtcacttatcgacattaaaaccctagttgatagagggagattttgtttcatgaaaacaaactgttctatgacttctgggattaccgcagtgagtaagaccgaaataactgcaaaagacactaatataagcatgacaggatagactaatgcctgaatgaatttatttttcttaagatgtgacttctcaatattatcagccaaccgtttcaggataagatctaactttccggatgattcaccagattttatcaatgctcggtacaacacgttaaaatctcgtggaaatgattccagagaatcagataatgagtagccagagataatattatttcttatcttttctaaagtgatagatactgattttcgttcagtttgctgcgatacggctaataatgcctcatcaactgggatggatgccgaagttaaaatggcaagttgtctcgttaaaaccaacagttctcttttattaattgttttcttgattcttccataccagtttataacattaactttttttatatttaagagtgttaatccacgagcacgtactagctctcttgcccctcggatactttccgcttcaacttgccccttacaccttgagccttttttatttatggcagaatatttaaatatgatcatcaatattctcccgagtgactcgaatcacttcctctaatgtagtcattccttgtgttattttaactatcccactattctttattcccactgttatttttcttgcgagtttctctaactcaatctcactacctcgtcgataaatacagttccttatactttcatccacaataagtaactcatgaatagccgttctccctctataaccaataaaattgcattgttcacacccaacggctttaaaaccggaaattaagccattatttgcctcatgcaaatcagaaaattgaaactggtgagggctacggcagtaaacacaaagttttcgtaccaaacgttgagaaatgaccgccagcaatgagcttgccaacataaaggtttcgatccccatatcttgcaaacgagttactgcgccagtggcggtattggtgtgcagcgttgagagtaccaggtggccggttaatgaagcctgagtcgctatcttagccgtttctgtgtctcgtatttcgccaataagaataacatcagggtcctgccgtaaaatggcacgtaatcctttagcgaagctcatatccactttaggactaacttgcgtttgcgcgataccattaagatcaaattcgatcggatcttctattgtcataatattacgaacgctactatcaatttccattaacgcagcataaagtgtcgtacttttacccgaaccagttggccctaccaccaatatcattccatgaggttgctgcaataacttccttattaacttatagttaccgtcctccaccccaagagccttgagatctaacttcacactacttttatccaaaattcgcagtacaacccgctcaccgtggttagatggtaaagttgacaccctgacatccaacgctcgcccaccgactcttaccgcaattctcccatcctgcggcactctcttttccgcaatatctagtcttgccataacttttattcgggacaccagtaaggccgttagttccaccggcggttcaagaatctgatttagcatgccatcaattctgaatcttattagcaatctttgctcgaagggctcgatatgaatatcggacgcagcttgcttcactgcttcagacaaaacggcatttataaggcgaataattggcgcatcgtcggtcgtatccagtaagtcatcatcttttggcaattgttctatgagggtgctaagagctaattcattaccgatatccgtcattatttgatgggcttgctgggcatcattctggtagaaatcgaccaacctggattcaaactcctcatcggtaaccaaggccagtactacctttccagaagcaactctctgcccttcgagtaaatcatcaaacgacgctgaacaacggcaaactaaatgacaaccatgttccatagggataagtaatacgccatattttcttgcccaactaaatggcataggtttattaattatggttgtcgacagcgacttcaattaacaccccctctaccataaaaagagttaatatctttctttattaaatttattacctctttattatttatagtagacaatctacgaacatcactatattcattcaccttaacttctgaattgactaacaagcttctacttttttcatttttttcattgaaagctctaaacttatctgatgtttcatataaatattcatcagcctctcttattattgtaggcttaatgaacaaaattagatttctcttttctactctatctttattttgtctgaataatgcgccaatgataggaatatcaccaagtataggcactttgtttataacattcgtaattttcttgtctaataacccgccgacgacgactgtatccccacttttaaccagcacggcattattgacgattcttttattgaacgttgaacctatattatctttatctgcactagagttctctgccacacttgatacctcttggcggatctccagtaataccgtatcccctttatttatttgtggtttgacctttaaaataataccgactgactgacgagatatcgtgttataaaccttatctgtgggtgtcgtttgctgtgatgaaagaacaggtacttcttggccaacgctaaattcagcatccatattatccagtgttactatgctgggcgtagccagaatatcattacttgaatttgtagccagagcggtgaataaacccgcccaatttccacgataaaatcccgtcgccagcccgctcataccattcaccacagcactcatattcccttgagcactattggttatttttccagagtcaagcaaactaacaccaccaccgtgactgtttgcccattgaatcccaaggttcatgccttcaccatcctgagcttccacaataatggcttcaaccaggacctgagcacgcctaatatcgagcttagttataacctgctctaaatcatacataaccgtaggcgctgcactaataatcaatgcattagtctgattatcagctttaatcatgatttttttatttggggaaaaagcaggcactgattttttcttatcatcttttaggctagaacttacaccatttaacacatctagtaagttttcagccttggcatacttcaaataaatcacttttgtatttccatctgccgtctgttcctgatcaagtttccttattattgataccgtatttttacgagccccggcatctccatttatcaggattgaattagttctttcatcagcaacaagctttacttcctgcggcatttctttctttgacgagctgtttgctctcaaaagttcattgacgatccgtgcgatatccatcgcagatgcatgtttcagcttaaagacttctgctattgagtcactttcacgatcaaatttatcaataatagatattaatctattgaccactgcggctcttccagtgattagcaacgagttattcggttcgtaatgtacgatactgccagaatctgtattatcatttaattgccgtaataacggcgctatatttttagctgaaatatactttaacggcactattttattaataagctcatcaccattaaaaatatcatcctgcgtaataattactgatgctgagccttttgctcttttggcgggaactaccttcaatatattattcggcatctcaattacagtaaaaccatacacgtcaaggacgttaagaaaaaactgtcgatacttatcttcatccatattttcgtaactacgaattgaaattgtcccctttactttaggatccatgattatagttttatttaatatcctacttgccgagtttacgaactctctgatatcagcatcttccaaccttacagtgtaatcatttgcataagttacaaccgaaaatagctgtacagctatgatggcgacagacaagcacagtttgttttttatatttataaaaataataaaaaacaaaaaaaacggaaacttacttttttccacataaatagttcttataatagagagcggcattgcttacccctaagttatgagattatgaattgattacataacgccatctcttaaaatcattataaataattcactattcttactaactacaattccatcttcaattatttttaaaattttagtctcaccatcactaagaaaatcatttttaaaatacgttttatttatctgattacttgaaactatagccatagatgatgaattagaactggttattgttcctgtcaggcgtgaatccccatagtattttttaatgagtaaaaactcatcacgactcatattttcaacgtcaatatcatctaacttttttgtgtatgtagaaacagctttttctttttcaccaaatataccaatggcttttactctatctatatcgtaattaattttatccaacgatactttctgatctaacttaacctttctttcatcatttttatataaaataacaacgtcattgttggcatgagtttcgtcataaaaatcatttattaataaaaatgcattatatatacaaaaaattacgggtaaaaaaattgaaaacctgtgagaactacttaacaaaaaggtggcataacttaatttaataattttaagcattgaccacctttttccattaaaagtatgttacttaaatatagctgataagtgctaattatttttagcacttatctaactactaacttgagatcaacaatagccataaaaacgatcatcacaatgattatttcctgtagcacacagcaaacttgtatcaaggcgcaagccgtatctgttgatggttttaatgatatcggcaggaatctcaaattcagacagtaaggttctaaatttgtgaattaattgatggtaattattatctgaaatacctttatggttttcataccaaacaacctttataatatcttgctttctattcacatcattgaataagcacataaccaagcgtttttgcttttcattaatgttgatagttagctttctgttatgaaagtggattttattcatgcaacaatcaacggatacctcagaaccatagtcaatgatgccttttccgttaatgtcgataaacttactctcagtaactactgacacagtattaacatacatagataactccccaagtaaaataataaaaacaaaaaatacgtaaaatcataattatcaataaataataagtacggtaataattattgttatcatccgttagataaagcaaatcaaattatataaaaagatatatttttatatattatgttttccaaagcaatctttcacatagactcaaacgcacgcaagccactgaatacatgaaagaaaaatacaaaacaaagagcaatgatttttgaatgttaaattatcacagtcccttttcacatcgaaatcatactaattaatcattatgcatatccatataattacatttaatctttaagaaggtttaggccttactgttaaaagtacagataattactgcatttgaaaagaggaatttatcgaaataagtaacctatatataacagttaaacttaaacttataacagaataccatttaatatgagttatcattcattataccgctgaaataagtaattattatcatgtaactatagttcataagacatctttacttttataagaattatataattacatctaaattcactagctaatgaattatttatatctttgatgataattttgtattgaatacgaatatcacatcaaaatcagttaagttaagttaagttaagttaagttaagttaagttaagttaagttaagttaacacacaatacgaatccagactaaacaatcaaagaacacaaattaaaattaatagaattgattccaataagaatattttattaatgatgtttatatatttaatattgcgtgaacatttaatttattattatctatagttcaacacacactatataaaattattaataaaatagaaatttttatttttaacatcgatgtggataatattaagttcaatttactacatgctgttacattgtaagaaaaaactattacttcacaaagtgaaactccaattaaataaaattacgacataagtttatcaattaaaaacggagaccaacgctaaccaacttaaggttagtgataataatacattagcatagccaactcgcaagaatagcttatttgctttactgaaaaccattaaatttaaacatcctctcatagaccgaacccgctattttttatttaattaatcaatccttactcaaaaattcaataaaattaaaattaaaaagttgggtgtaatatgtaatagacgtggctttatcgtgttcggtagttagtgaatttatagttttttttgcattacagcatttagaaaatggcctaaaaaaataaactctatcaaggcactataaagcaagctgaaaagccagctcagaaattggaagtatatacatacaatattgatgaggtagcgacccagcgtaataaaaatgaacttaagccaaaggataggcttagccgcggctggatacgttttacaatgaaaattgaccgcatccactgtgaacacgatgctaactgctatgcggtgagtaaagaaggtaggatgggatttattttcgcccaacgatacattgcccgcacaatacaaagttagatgattttcaatggctcaaataatttgatgctgggaataccttagatacgtttacagcaaatacaaccatcagggacggtattgtgattgatgcttccgactttaaatataagtgttctcttctgacgctaaagcaatgcttggagcaagtattatgcccaagttaaacggcaactttctaaatttatagcggtttctagtttaagattatttttagattgttgtgcacacaacgagtgggctaatagcttatttaagcactaatcgccattttcccaataggatgatgatcgccgtcatacatagctatagcaatatttatgggctatacgctgaagaagttcttaggcgagcattgagttgtcttgcgcttcgttctattcatatcaagatccacgcgtagaaagcatggcatgtataaatttttaaggtgggaaatttatctgcggataactatgcgttttgcagacagaatctatgagtatcgactgatacaacgagggggaaaaatttaattcattgatataaatggatttattagaggttgggaaatattctgagacatgtttttggagcgggtgaagggaatcgaaccctcgtatgcagcttgggaagctgccgttctaccattgaactacacccgcgtctatgtgcgagtggcattataaccggttatgccttaggggcaaggaaagatatgctttaactgccggaattttaagctgttagcgttgttattttcttaactggcttatttgatagctgtaaaaaagggcgcctaagcgccctcatcgataaagttcgggattacttaaccggacgcatcgcagggaacagaatcacatcacgaatggtgtggctgttagtaaacaacataaccatacggtcgatcccaatgcccagaccagcggtcggcggcaagccgtgttccaacgcagtgacataatcttcgtcgtagaacattgcttcgtcatcgccttcatctttagcacgaacctgctccgcaaagcgctcggcctgatcttccgcatcatttaactctgagaaaccattaccgatttcacggccgccgataaagaattcgaaacggtcagtgatgaatggattatcatcattacggcgagccaatggcgaaacttctgctgggtattcagtgatgaaggttggctgaatcagatggctctctgcggtttcttcgaagatttcacactgaacacgccccagcccccagctcttctcgactttgattcccagagactcagcgatagcaacagctttatccatgtcgtccagatcggtaacgttggtttcaggacgatatttgcaaatcgcttctttcatggtcagtttggcaaatggtttgccaaaatcgaattcctgctcgccgtatttaacgacgctgctgcccaaaatggtttctgtcagcgtgcggaacagttcttcagtcagaacgatcagatctttgtaatccgcatacgccatatagagttccatcatggtgaactcaggattatgacgcggagaaacgccttcgttacggaagttacggttaatttcgaatacgcgctcaaaaccaccaacaaccaaacgtttcagatacagctcaggcgcaatacgcaggtacatgtcgatatctaacgcattatgatgagtgataaacggacgagcagatgcgccgccaggaatcacttgcatcatcggcgtttcaacttccataaagcctttttccaccatgaactggcggatgccggacattacctgagaacgcactttgaaagtattacgcgattcatcgttggcaatcagatccagatagcgctgacgatagcgagtttcctgatcggccaaaccgtggaatttgtcaggcaacggacgcagcgccttggttagcaagcgcagttcgctacagtggatagacagttccccagttttggttttgaacagcttaccgcgagcgccgagaatatcccccagatcccactttttaaactcttcgttgtaaacgccgtctgccaaatcgtcacgggaaacgtacagctggatacgaccgccgacgtcctgcaaggtaacaaaagaggctttacccatgatgcgacgagtcatcatgcggccagccacggtcacttctacgcccagcgcttctaattcttcgttatctttatcaccgtacgcagcatgcagttgatctgagaggttctcccgacgaaaatcgttcgggaaagcaatacccttctcacgtagtgcagccaatttttcacgacgcgcctgtaattcactattcagttcttgcacttgctcagcgacttgtggtttttgctctgacatttcagttcctcataacccggctttcaaacttgcctcaatgaatttatccaggtcgccatccagtacggcctgcgtattacgcgtttcaacgccggtgcgtaaatccttaatacgggaatcatccagtacataagaacggatttggctgccccagccgatgtcggatttgttgtcttccaacatctgtttatcagcatttttcttttgcatctcaaactcatacagcttggctttcagctgtttcatggcttgatctttgtttttatgctgagaacggtcgttctggcactgagtcacaatattggtcggaatatgggtaatacgtaccgcagactcagttttgtttacgtgctgaccaccggcaccggaagcacggtatacgtcaatacgcaaatctgccgggttaatttcgatatcaatatcgtcatcgacttccgggtagacaaaagcagagctgaaagaggtgtggcgacggccaccggaatcgaacggactcttacgcaccaggcgatgtacgccggtttcagtacgcaaccagccgaacgcgtattcaccgatgatcttgatggtggcagatttcaaacctgcgacgtcaccgtcagattcttcgatgatttcggttttaaagcctttggcttcagcccaacgcagatacattcgcagcaacatgctcgcccagtcctgcgcttcggtgccgcctgaaccggcttgcagatcgagataacagttggcgctgtcgtattcgccggagaacatacgacggaattccaactggcccagtttgccatcaaggatttccaactcggcaacggcttcgtcgaaagtctcttcatcgtcggcttcaatagccaattccagcaagccagaaacgtcttccaaaccttgagccaattggtcaatagtggtgacaatttcttctaatgcggaacgttctttacccaaggcttgcgcgcgctcgggctcattccaaacgtcaggctgctccagctcggcgtttacttcttccagtcgctctttctttgcatcatagtcaaagataccccctgataacggcggtccgttcggacagatcctggatacggttttttaccggattaatttcaaacatttttttgatgtcttaggttgagtcgttgatggcggaatgccattcgaaccgataattctaacggatctcaacgacggtttatagcaagttgaccgtatttatggcgctatctggacgaatcgcgccattagtcgcattttgcgaacttttaacattctgactaataaggccagaggtgctgaatcagcaattgaacgttgcggttaccgcggaattcattgatatccaacttataagccactttaacttcgcgcacgctgctatccggccataaagtggtatcaatattaaacgcgataccatccagcaacgggccaccgtttaacggttccagcatcactttcagatggcgttcccccaccagccgttgctgcaacagccggaattttccgtcgaaagtcggttcagggaaagcctgcccccaagggccgccgtcacgtaataattctgcggtttccagcgtcatttgcgcgccggtcagttcgccatcggaccagataaccccttcaagctgagaggcatccatccactcgcccaccaaatcggcaaaacgctgacggaactcgtcgaatttttgctgttccagcgataaacctgcggccatagcgtggccaccaaacttcagcatcaggccaggattgagcgtatccaggcgttccagcgcatcgcgcatatgtagccccgcgaccgaacgtcccgaaccttttagtattccttctcccgctggcgcgaaagcaatcaccgggcggtgaaaacgttctttgatacgcgaagcaagaatccctaccaccccctgatgccattcggcgtgatacatggcaatgccgtaaggcaactccgtgctggtacgttccagttggtcacaaagttgtaaagcctcaacctgcatgctttgttctatttcacgccgcgccaggttcaagctatccaaatccatcgccagtgcgcgcgcctgagcaatatcatcactcaaaagtagcgccacgccgatagacatatcatccagacgaccggcggcattcagccgagggccaagggaaaagcccaaatcgctggctgccagctggcgcgcatcacggtttgccacttccagtagcgctttgattccggggcggcattttcccgcccgaattcggctcaacccttggtgtaccaaaatacggttattggcatccagtggcaccacatcggcgaccgttcccaaagccaccaaatccagcaactccgctaaattaggaatcgccagcgctcgttgctcaaaccagccgctatcccgtaatcgcgcacgcaaagccagcatgaggtaaaaagtcacgccaacaccagccagcgatttcgatggaaaatcgcagcccaccagattggggttaataatggcttcggctgccggcaaaacgtcacccggcaagtggtgatcggtaaccagcaccttaatcccatgagcatgagccaaatcaacgcctgcatgggaagaaataccgttatctacggttacgataagatccgcaccgcgggcaataacctgttcaaccacttccgggctaaggccgtatccatcatcaaaacgatttggaaccagataatcgacgtggctgcagcccatactgcgcagagataacacggctaaggcggtgctggtcgcgccatcggcatcgaaatcaccgacaatcataatacgctggctatcggccaatgcctgctgcaacaaactgaccccggcatcaatgccgtccagctgttgataagccagcaggcctttcactccgcgctccagctcttgcgcccctttcacaccgcgagaggcgtacaaacgacgtagcaacggatgcaattgctccggcagcgcactctcatcggcaagttcgcgacgacgaagttgggtttttatagccactggcgatcaaccaccggttttcttggaagcctgatgcgctcgcagcatggcaagcatctcttttggcccctgatagcccggaacaatggtgccatcctgcaatacgatagccggagtaccctgaatgccgaattgcacccctagctgataatgtttagcaatatcggttttacaggttgccggggaaatagcatcacctttcatcgccgcatcaaaagatttattgcggttagcggtacaccagatagaacgcatgtctttttccgcctgagaactcagcccctgacgcgggaacgccagataacgcacggtaatacccagcgcgttatagtcactcatttcttcatgcagtttatggcagtacccgcaggtgatatcggtaaacacggtaatcacgtgtttttcctgcggcgctttgtagacaatcatttcaccgcttaatgcttccagttttttcagcagcaattgattagttacgttaaccggctgtgcgccactaacgtcatacagcgggccttgcagcagctgtttgccatcggcggaaatataaagcactccgctgtccgtcattaccgtgcttaaaccagcgataggggaaggctggatttcagcatttttaatatccagttttttcaatgtctgttggatagcagcatcatcggcatacgccaaaccagaaagcgaagccattaagattggcagcaacagtaaactttttttcattgaataatcctatttttcttctacagcgcaatcatgcgcgcggatggtgctgttgatgtagctgtttcaggcgttccgtcgctacatgagtataaatctgggtggtcgacaaatcgctatggcctaatagcatctgaaccacgcgtaaatccgccccgtggttcagtaaatgcgtcgcaaaagcgtgacgtaatacatggggggaaaggcgctcactatcgatacccgcaaggatcgcatagtgtttgatacgatgccagaaagtctgtcgagtcatttgctgactgcgattactggggaacaatacgtccagcgcctggccgttaatcaaccaaggccgcccatgttccatataattctcaatccagtaaaccgcttcttcaccaagcggtactaatcgctctttattccccttacctatgactcgcaccacgccctgccgcaaactgacatcactaatggttaatccgaccaattcagacacacgcaaaccggtggcgtacagcacctctagcatcgctttgtctctgagttccaaaggaatatcgacattcggtgagttcagcagtgcgtcaacctgcgcttcgcttaagtccttcggcaaacgttggggtaatttgggcgatgacaacagcgcggttgggtcatcttctcgcaatttttctctatataaatattggaaaaaccgacgcattgcgctcagcaaacgagccgaactggtagccttatagcctccctcaatgcgttccgccagaaaggactgcaaatccaaaggatcggcctgcagcaaatccttattgtggtggtgtaaccagccagccagcgcctgaagatccagacggtacgaagccagagtattttcggccagattacgttccagccacagggcatccaaaaactgttcaatcagcgggttattttgctgttgcatccagattcctctcatcgattgaactcagcatggcattatgcctgatgagggcacaaatctggtacactcgatgctattcctattcgttaatgctatggctacacaacatgaagattggtctcttttacggctccagcacctgttacaccgaaattgtggcagaaaaaattcgcgatattctcggtgaagatttgatcgatctgcacaatctgaaagacgcagaccctgcgctgatggaacagtattctgtgcttattctggggattcctacctgggatttcggcgaactacaggaagattgggaagcgatctggccacggttgagtcagttgaatctgcggggaaaaattgtcgccatgtacggtatgggcgatcaattcggctatagcgaatggttcctcgatgctttaggcatgttgcacgatcatattgccccactgggcgtacaatttatcggtttctggccgacagaagggttcgaatttaccagcccgaaaccattaagtgctgatggtaaacatttcgtcggcctggctctcgatgatgtcaatcaatatgaattaaccgaccaacgcgttgaacagtggtgtgagcaaattctgattgaaatggaatccttgctgtaatgccagctgcgggcgcaatggctgtgcccgcagcttcgaaccttctcgcggttatttccacagacggaaatgttcacttccggcgcagcctggcggtggaatttcatgacgttcgtcagcaggttttttagcaacccgtctctgcggatcggccaactgataccaatccagacgccgagtgagcaacatcactaccgccagcacgacaaacagcaaaccagatcctaataacaacgcgttatcttctgattgcagcaatccgtaaagtaccccatacagtaataataaactgcctgcaaacagtccgcctcgcagccaactacccagcaccgcgcctaaatacaccacaatcaacagactacaacttaggctggccaccagataagccaaggcaaaaccgatatgctccgacagtgctagtaacatcagatagaacagaattaacgctatgccaaccagtaaatactggattgggtgcaaacgcagtgacgtcaggctttcaaacaggaagaagctgataaacgtcaggccgataaacagaatcgcgtatttaatggctctttgagttaactgataatgattgaccggctcaatcaagctggtgctgaaagcgggtaacgcatcaaaatcaaacggcacttcatctgtagcaaaaatcacgttcagattattagcaaaccaggtgctgctccagtgagcctgaaaaccattcgcgccaacccgtcgttgattcggcaagaaatccccgaggaaattagggtgcggccagttactttccagcgtgagttcactactgcgccccaaaggtaccaaggacaagctgctggttcccattagtgtcagagtaaaatcaaccgtagtttccccttgctgtaaacgatgcaaatccagcatggcgtgaatcccctgactccccgcgcctaagtaagcaccgggctggaaatccatcgcatcgccgttgattttcagcggagacagtttctgaatccctcgcgcatcgctcaaacgcaccactaaaataggttttccaaacgtgattccgggtctgttgaggtaatccaggttttcactatcaaatttggcactgaagtgcagcggaccctgatagacctgagtacgataaatgccaagttgacgtacatctacgtccggcgatcccgttacggataaggtttccggcagtagataatggaaacggctaaccttttcctcgcgctttacgccttctttttcaacggtgaccatttcgctgtaaggcacaacgatcaacggaccaagaattttttgcgcgccactagtgctatcagtgactttgctaatcacgctgtaacggtagttgcttcgttcgctaatcacgctcatcagcatttctttgggaatcatcatcagtaagatcaatcccagcaacgtggttattttccagaacaatacggatttaaacataagtgaggctccttaacggtcatgaagccagaataagacgcggaagtgaaagcagaatgagcttgtgtgaagtgagtgtgaagttatgggttttcttgcatcagcggcaacatcatttccacgcgaaccccctgtggcaggcgattagccagccggatggtgccttgatgaataacggctacttcgcgcacaaaattcagccccagaccggtgcttttcgggccatcaggacgcggaagagaataaaaacgttcgaaaaccttttccttagcgtattcgggaataccacagccgctatcttcaataatgatatggtagttatttgcccgctgttcgccacacaaggtaatttcgccacctttcggggtaaaatccagtgcattatcaatcagattagtgagtgcctgactcaacattaaaccgtctcccgccagcacggcgcgatcgcaacgttgtaaaatcaaagctacacctcggctacctgcctgagcttctttaccagcaataacctgtttaagtagcgaatcaatgctaagcggttccaactgtaggtctacccgactttccagacgtgcctgtaccagcattttatccactagttgctgaatacgagcgctttgctgttcgatattcaataggaatcgctgtgccgtggccgccggaggtgcttcccgcaataactctgctgcgccgcaaatcgcagccagcgggctttttagttcatgagtcaacgtgtgaacgtattgctcaatataggccttgccatccaactttagccgcatactttctagcgcacgtgccaagccgcccagctcgctgctgcccattttgggcaacggcacggcttcgccctccgcaacccgctccgcgtaattaaccaatcgaccaattgagcggttgatccaccatacaaaacccaggccaatcaataacgcaatacccaacagaaccgcaccagccagaagtattcttcgttcactgcgtttaataaccggagccatagagaggtttggtttccccacgctcaacacgccaatgatttgattatcaaccattaccggagcggaaacgtacatcactgagctttgctcatcgtttggatcgctcaaggtactacgtgcgccgtattgaccgcgcagcgtcagccagacatcattccatttagaataatcctgcccgagagcctgcccggtggaatcaaaaatgacctttccgcgggcatcagtaagataaacccgatattcgttacgatctttgcgaataccggcgatattggcaccaatcggcttcttattcagcgtggcgaacgcttccgccaactgcccattcgcggcattacctcgctgcatatcctgccgggcaaactgcgctagcaaagtagcagtatccaccagcgtcccttcggtcgcacgcctcacgccgggtttcacttcctgcacaaaaatactgatcacaaagtagccggcgatcgccactatcaaaaaatacccgagcaacagacgcaggccaattttcatgggacatagctcagactgtagcccagcccacggtgagtacgaatcggcggttcttcatcccgaacagcgcgcaacttagcccgtaacgttttcacatgggtatctacggtgcgatcctgactttcttcggcctgagtccagacgatatccatcaactgttgacgggaaaaaatgcggtccggagctaataacagggttttaagcagtaaatattcgtaacgggttaaccagagaatttgttgctgataggtaatacgcgcggcggcttcatccaacgtgaaagcgccaaaccgatgaattagcggtacgggtgcgctggactgcgacttctgtaaacggcgcaaaatggtacgaacccgtgcgctaacctcgcgcggagaaaaaggtttggctatgtagtcatcagcaccgatttctaacccgactatgcgatccagttcttcactgcgcgcagtaagaaagaccacgggtaaatccggagataaggccaacagacggcgacaaagatcaaaaccgttaatatccggtagcccgacgtcgataatcgctaacgctggcaggccgtgatgtaacgcagcaagcgctggctcgccgcgatcaaaccacttgagggtgaacccttcactctctagcgtatagatcagcgtgtcggcaatactcggctcatcttccaccagccagatcaatggtttcattacttactacctgctgcagaatcaaaagtgtgttgaaatatcaggcacagctcgcgccattcatcttcagacatgctatcagaggctagccagacgcgctttctacgctgactgccggcgccttgaagcgataatagtacgccataacgggtaatccacggctgtcgaaccaacttccattcctgacgtttccatatcagcagatttccagcttttaaccggatttctccctggcgggaggtaatgcttttctggctacgaatacattcgaaaacgaccagcgtcaacagtatcaaccataaaggtgtacagccatctggccaaggcgcgaccagcgttatcaacaccaaaacgccatgaatcaataaggaaaaaagttgggtgcgccatgaaacccgcaggtcacatcgccactgggccacgggctttatttcgcatctgaatcagttgaaccatccgtttcagctcgctgtcctgcggctccccatgattcatcagccagttgaataaatcaggatcatcgctcgtcagcaagcggacaaacacgcgcttatcgtcatcgctcagcgtgtcatattcatactcaaagaacggcataatggagatatccagctcacgcataccgcgacgacatgcccagtggatacgagctttattatcaatttccatgtcctgattgaccccttgcttaaaatgttatttgaatctggccggatggccgctctgccaaagattcaactcgtgaatagagtagcaatttgcgacgcctgacgggaaggttatcgccactaaaacgcggactaaggcgtgaaatgataaagcaatgtggattttttgaccgcattaatccgcgctcgttgttatttttgcgcattgtaccgcaggatgtattgtaacaatggtgtatgcggataattactctttgcaaaggctcccgcctcttttaccattgggtcatcagtccacggcaccttttggtaggatgtaatatggcatatgcaactccgttccctccgcgtcaaccctccgcctcttctgcgttacctttgactctgatttcattggatgactgggcattagttacggtaaccggcgccgaacgcgttaaatatcttcaaggtcagctcaccgcagacgttgatgcgctagcggtagatcaacacgttttgaccgcgcactgtgacgcaaaaggtaaaatgtggagcaatatgcggctcttccatcggggcgaaggattggcctttattgagcgccgcaatgtgctggaaaaccagttggccgagctgaagaaatatgccgtattctcgaaagtgacctttgctattccatctgacagtgttttgctgggaatcgccggggcgcaggccagagaagcgctggctcaggttttccctgaattaccgacggcagaaaaaccggtagtccaatccggtgatgctacattgctgcatttttctacgcccgcagaacgtttcctgttagtgaccgatgcagctcaggccgccagtttagtagagaaattgggtgagaatgcccagttaaatgacagccagcagtggttggcgttagaaatagaagctggattcccaattattgacggcccgaatagcgcccagtttattccacaggcaacaaacattcaggctctgggtggaatcagctttaccaaaggctgctacacgggccaggaaatggttgcccgagcaaaatatcgcggagcaaataaacgcgccttgtattggcttgtggggcaaggcagcagcacgcctgaagccggtgacagcttagaatggcaattgggtgaaaactggcgtcgtactggtacagtgttggccgcgattcaacttgaagatggctcgctttgggttcaagcagttctaaataacgatctggccgccgatagcgtgttacgcgtacgggaagatgcggcagggacattgcgtatccaaccattaccgtattctttagaagagaataattgatcctctgccaaaacaatttatagcccgtatcgtcttgccaggaaaacatagagacaaggcgagatcagaccatgcgagatctggcagtgcaagataaagaggccggtaatccggcctcacaatctacagacggtatctgtctttagcgaaactatcgtgatattcagggaaaactctggattttctgggtaacgcaacaatctagtgttctggaatagatttacatcttaaacgtacagataaattgccataaagtggcacaggctaccgccaagcacgaaaccgtgccaaatagcgtgaccaaagcgaatacgcttcgaagcgtaaaacactactcccagcgtatacagcaaaccgccaatcgccaacagtgcaataccgcctatatctaacttaatagccaactgatagataacgatcagggatagccatcccatcgtcagataagtaatgagcgaaagcacctcaaaacgatgcgcaaatgccagtttgaagataacgccaaaaagcgctagcccccaaataaccgccattaatcctctcgccaaagtagaatccagcccaaccaataagaaaggcgtataagtgccagcgatcaataaatagatagcgcagtggtcaaatttcttcagccaatgcttagccttttgatgtgggattgcgtgatacaacgtggatgcaaggtacagcagaataatgctgccaccatataaactgtagctggtgagcgcggtggtacttgcaccgctgtctacggcctgtaccagtaataaaaccaagccgattatgcctaataccacgccaataccgtggctgacgctgttggctatttcttctgcccaaggataaggctgagcttctgataatgccggtttgactgattcattgttcaatactaatgtatcctgttgattcttatgggtgcgggtgatggacattctgtcaggttttgacctgttcattattattggaatcctcgcaggttaattgtgcaaaaataccgctttaaggttatctgagaatcattccagtgtacacgtgtaagctcaaaataatctgtcattgtttgtaaaccttggcctgcccgcccgagaaaatcgataactgactaaaaccccgctcaggttagcgaaatgctgcacagtctggcctacactctatccgcgccattgttggtatacgccctatttttctcgaggtttactatgtctttcgttcgaccagttctggatttcggccctttgactgattcaattcagtttttgatggaaattgataagctaaaaagcattcaacgcagaaccaagcttattgcctgcgaacgtcaggaaaactcggcggagcacagctggcatttcgccgtcgccgctatgacactagcaccttatgccagcaaagatgtggatatcaatcgagtgattcaaatggcgctgttgcacgatatcgtcgagatcgatgccggtgacgtgatcgtctacgatctggcggcgcgcgcagctatccatgataaggaagtcgccgcagccaaacgcctgtttggaatgctgccgccggaacaaaatgcaaaatttagtgcgctatggcaagaatatgaagatgaaaaaacgcctgatgcccgttttgccacggttctggatcgcattttacccatgctgatgaatttgcataacggcgggcaaaattgggtagaaaacggcattcgcctagagcaggttgtcgagcgtaatcagctagtggctgaagattatcccgagctgtggagctatttatttcgtcatttacaggatgcacaggctaagggctggttggcctgagacatgacgaaaatctcagcgataggttcaagagtaatgcttcatattgagcattgagcattgagcattgagcattgagcccagagtttgaatatctgtacctgaataactcatatttaaatcactagcgctggaatgacgatcatcctaataatgaaacctgctgcccgtattttgctcgggcagccttctcaatcaaagtgttactttccacctgccaattctagtgcgctgccggtaacgtaagaagcgctatccgatagcagccaaacaatggcttcagcgacttcatcgggctgaccaccacgtttcatgggtagctggctcgccactctttcaactctgcccggttcaccgccgctggcatgcatttcggtatagataaaacctgggcgcacgccgttgacacgaataccttcccccgcgacttcgagcgataagccagtggtcagagtatcaattgcacctttcgatgcggcgtagtccagatattcgccgggagcccctaaccgagcggccgcagaagaaacgttaactatcgctccgccgcgaccaccgtgtctttttgccatacgttttaccgcttctcggcaacagagaaaatagccggtcacgttggtactaagtacccgattaattcgttccgcactaatcccttcaattcccgattgttgaaacaaaataccggcgttattgaccagcgcagtaatagtgccaagctgattatctaattgattaaacaactcaataacttgttgttcgtcggcgatatccgcctgcaaggccaccgcccggccgcccatcgccacaatctgatccacaacctgtaaagcggcttgatggtcgttgacgtaattgatgccgacctgataaccctgctgtgccagtaataatgcggtggctcgccctatccctctgctgccgccggtgactaatgcaattttttccatagcatcatctctgctttattttgttgtacggtctgacgtcagaaaattttcgcccaaatcagtacccctacctgcccgatattattcatcggcattgtcggcgtacgtaggatcagtcgatctttttcaaactcatagtaacgaaccatctgggtgccaacccaattaggaaataggccaccttcaacaatatgagtaatactctgtttttcctcattaatctgataacgaccaaagtagcaaagcgcgctctcgaaagccgatttcatttccgcatcactgccttccagccagtccagagaggcgaaatcacggcgctcagtggtataaagctgagcagccatagtgccattttttttgtaatgtatccggcctgataccttctcgcccattgggaaagaaacactgccgtcttgcaaaataaaatgctgtgaaaattaagcccagctcccaaaaattctgtcactaatcattataattacgctaatatttgtttatatgaaaagtaatcgtagtcattgatagggttatattccaatcaggaaataatgcgcagaattagtaataacttttgattgtctgggcagattttagatagaaaaagggccgctttcgcgaccctataagcaggttactctttagtgattactcgtaatcaccgataggaacgcaggaacagaataaattacggtcgccgtacacatcatccagacgttttaccgtcggccagtatttattttccatcacgccagcaattgggaacacggccaactcgcggctatacggatgagtccactcacccaccagttcagcctgaatgtgcggcgcgttcaccagcgggttatcttctagcggccattcgcctttcaccactttgtcgatctcggcgcggatagccaacatggcatcaataaagcgatccagttcgaccttgctttctgattccgttggctcaaccatcagcgtcccggctaccgggaaggacatggtcggcgcatggaaaccgaagtcgatcagacgcttagcgatatccatttcgctaataccggtttcttctttcagtggacgaatatccagaatacattcgtgagctacgcggccatcgtggccggtgtacagcactggataagcattttttaaacgagtggcaatgtagttagcgttcaaaatcgccacctggctagcctgtttcagcccctgagcgcccatcatgcgaatgtacatccaactgattggcagaatagatgcactaccgaacggtgcagcagaaactgcgccctgctgcgtcgtcataccgtcgatttgcacaacgctgtgacccggaacgaaaggtgccaaatgcgctttcacgccgattggccccatgcctgggccgccgccgccgtgagggatacagaaggttttgtgcaaattgaggtgagaaacatctgccccgatataaccaggagttgtgattccaacctgagcattcatattcgcgccatccaaatacacctgaccaccgaactgatgaacaatctggcagacttcgcggatggtttcttcgtacacgccgtgggtagacgggtaggtgaccatgatgcaggaaagctcatcaccggcaacttctgctttctgacgcagatcgtgcaggtcaatattgccttgtttatcacaggccaccaccaccaccgacataccggccatttgtgccgacgctgggttggttccgtgagctgagcttggaatcagacacacatgacgccgggcttcattgcggctttcatggtaacggcgaatagccagcaaaccggcatattcaccctgagcaccggagttcggctgcatgcacacagcatcatagccggtcagttgcaccagccattgtgacagctggccaatcatttgttgataaccggcggcctgctctggcgggcagaatggatgcaactcggcaaattccggccaagtgattggaatcatctcggcggcagcgttcagcttcatcgtgcaagaacccagcggaatcatcgcctgattcagcgccagatcttttttctccaaacgatgcatataacgcatcatttcggtttcgctgtgataactattgaatactggatgcgttaaaatcgggtctttacgcactaaagcttcaggaattgagcggctttctttgctcacttccgcatccagcttatcaatatccagaccgtgttcatcacctgccagcagagcaaacagagtttgaatatcttcgcgagaggtggtttcgttcagagtgatacccaccgcgccatgaatatcggtacgcagattgataccaaagcttagggcgcgcgccaataccgccgctttgtctttcacttcaacggtcagggtatcgaaccaggttttgaaacgcagagtcagaccggcttgttgcaagccagcggccagaatgtcggtcatgcgatgaatacgaccggctatgcgttgcagcccctgcgggccatgataaaccgcatacaggccggcgatgtttgccagtaatacctgtgaggtacaaatgttggagttagctttctcgcggcgaatatgctgctcacgagtttgcatcgccatacgcagcgcagtgttacctgccgcatctcgggaaacaccgataatacgacccggcattgagcgtttgaactcatcgcggcaagcgaagaaagcggcgtgcgggccgccgtaccccattggaacgccaaagcgttgagctgaaccgaaggcgacctctgcgccctgctggcccggagcggtcagcagtaccagtgccatcaaatcggcggccatacaggtaattattttacgttttttcagcgctgtcagcagtgtgccgtagtcgtgcagctcgccggtggtgcccacctgttgcaacagcacgccaaagacgccctctagctccagcactttttcagcgcgatcgacgataacgtcaaaaccgaaggtttcggcacgggtgcgaaccacgtccagagtttgtggatgaacatcgtctgcaacgaagaaacggttggcatctttcactttgctggcgcgtttacacagcgccatagattcggccgctgcggtagcttcatccagcaaagaagcggaagccagatccagaccggtcaaatccagagttaattgctggaagttcaacagcgcttccaggcgcccctgcgaaacttctggctgataaggggtataagcggtgtaccagcccggattttccagcatattgcgcagaataaccggcggagtcagcaccgggctgtagcccatcccgatataggatttatagcgttggttttggctggcaatcgctttaagttcggccagagcctgatgttcagtggctgcgtcacctaccggcggcgggcccggcaattgaatatctgccggaacaatctgctggatcaatgcacttaacgaacggacacctacagtagccagcatttcttgctgctgctcggcgttagaaccgatgtggcgctggataaacgcgtcgttatgttcaagttggctgagagtctgagtcatttgctacaaattcctgaatcaagcatgggacgggatacggtcggtcgatacaaaaaaaagccccggctcagcaactgaaacggggcgatactcttattcgtccagcgtggtgcgataggcgtctgcgtccagcagactatccagctctgactcgtcagaagccttgatgctgaacaaccagccgtcggtgtaaggtgcgctgttcaccagttccggggagctttccaaatcggtgttaaccgcaacgatttcgccgctgatcggcgcatagatgtctgatgccgctttaacggattcagccacggcgcagtcgctaccggcagaaacatcgctgcccacttctggcagatcaacaaataccatatcacccagtaattcttgtgcgtgttcggtaataccgacgctataaacaccgtctccatcggcacgaacccattcgtgagaggatgcatacttcaattctgttggcacattgctcatggctaccttctccttagaagatattggtgatttattattagacgaaaattacagcgcgatcgctttacctgctcgcacaaaacccggtttggtgaccttaaccggcatagcgcggttgcggatttgcaccaccgcctgctcgccaatacccgcaggtactcgagccaaagcgatactaaagcctagcgtaggagagaatgagccgctggtaatcacaccgttgtgtacgttgcccgcatcgtcggtgaaatgcactggcagttcgttacgcaatacgcctttttcggtcatgatcaggccaaccagtttgtcagtgcctttggctcgctgctgttccagcgcttcacggccaataaactggcggtcttccggtagccaggccacggtccatcccatattggcttccagaggggaaactccttcatccatttcctgaccatataaattcattccggcttccagacgcagggtatcccgcgcgcccaaaccggcaggcttcacgccagcggctaacagtttctgccagaaatcaactacctgctcttttggcaaggcaatttcatagcccgcttcgccggtgtagccggtcgtggcaataaacaggtcgccggtttgtacgccaaagaatggcttcatgtcggcaatagcctgtttttgctctgcgctgaataaagtcgctacgcgctcctgagcctgcggcccttgaacggcaaccagcgccaaatcgtcacgcacggtaatatcgatgccgtaaggttctgcgtgctgagtgatccaggccagatctttgtcgcgagtcgcggagttaaccaccagacggaaataatcttcactgaggaagtagacgatcaaatcatcgataacgccaccagatgcattcagcatcccggtatagagggctttgcccggctgggtgagtttggcgacatcattcgccaacagataacgcaggaattcacgggtacgcgcaccgtgcaaatcaacaatggtcatatgggaaacatcgaacataccggcatcttgccgaacgatgtggtgctcatctaactgggagccataatgcagcggcatcatccagccatggaaatctaccatgcgcgcaccgcacgccacatgctggtcgtacagtggagtctgctttgccatcttttccctcttttcactcaaacagtgttccggacacaagagaaattcagggcaccaatacgcgataaagataactcagactcataaatagatttatggccttaccgctggcaccggctgacttgctcaacagaacgttgcgtcagaccaaatcatcagacttcggtgaacggtcgtgaaattgcggctaaacaccgagacgcaaacgatacctttcacctgacgttatcactgaatcgacaaaggaaccataagctaaattacaaggtgaacggttcagcaaccacaaaaggcaggggtattgtgcagagttttcaactggcaaactgcgtacagagacacaaaattaacaaataattagtaaaaataccgatgttatataactaaaatgccggatagccctcagtttcaacttttaggtattcggcacttcatgagaaaatgtaatgcgaaaatggtgctggaattagattttttcaatcgagcagctaaggttgcaaccactcgggaatatcattcagtcccattgcctgacgaaccagtttaggtttcaccccgggaagagagtctgccaacgttaagccaatgtctcgtaacagtttttgtgccggattattgccagaaaacagttcgcggaagccctgcattcccgccagcatcagtgcggcgctgtgcttacggcgacgttcatagcggcgtaagtataggtgctgaccgatatctttcccctgacgctgtaagcgacgtagctccgaaaccagctccgcggcgtccataaagcccaggttcacgccctgtccggccagcggatgtaccgtgtgagcggcatcaccgaccaatgccagacggtgtgcggcaaagcttcgggcataacgccccatcagtggaaatgtttgtctatcactttcaacctgacacatgcctaactgcatatcaaaggcaacacccagctcacggttaaactgctccggcggtaattcggcaagtcgtgccgctttttctggcgctaatgaccaaacgatcgaactgagatttggctcgctaaacggaagaaatgccagaataccgtcaccgtgaaacacctgtctcgccttagcctgatgaggttcttcggtgcgaatagtcgccaccagtgcatggtgaccataatcccagaaggtcagcggaatatccgcatgttggcgcagccacgaattcgcgccgtcggcaccaaccaccaatctcgcgctgagcaggcgatcgtcggtcagagtaataaaagcctcgctttccccccaggctacctgcttcaaacttgccggagccagcagagtgatatcaggcagttggctggcgcgctgccataatgcttgctgaatcactcgattttcaatgatatggcccaaatggctaaaaccgtactcatcggcgcggaaagcaattttaccgaagctgtcctgatcccagacttccattccgtcataaggactggcacgcatcaccagaatgctgtcccagacgccaatatgctgaagcagcttttcactggcggcgttgatagcagaaacccgcagttccggtgcgcccgtcagcggaacggggagttcgtcttccggctgatgatgctccaaaatggcaatacttaagccacttccctgtaaaccacaggccagcgccagtcctaccataccgccgccggcgataactaagtcaaatgattgcatgctactttatttcctgtcgtgaaaacggcaaagaacctgcccaccagcggcggcaggatctaaatggggtggattagcgctcaacccaccccagagtgcgtcgtgcaaaagcatcgcgcatcgttggcatctgttccatcgccattagccccaaattacgccctgcggccagcggagcgtaattatttgcgaacaaacgaatcaacccatcggtcacgccaatggttgcctgttggtccttgtaacgacgattttgatagcggcttaatgcggagtaagcgcctaaatcagttccagcctgcgtcgcttccgtcaaagtttctgccaatgacataacgtctcgcagaccaaggttaaagccctgaccagcaatcggatgcaaggtttgcgccgcgttgccgaccagcgccagacgatggctaatatggcgggaagcggtcaataaacgcagtggatagctgtggcgtttaccggctttcagcatttttcctaaccgccagccgaaggcggtttgcagctcagccagaaattccacgtcgtcccaggcgtcaactttggccctatcttgctgcggatgacaccataccagagagctacgcccaccagacattggcaataatgccagcgggccgtggcgggtaaagcgttcaaacgcgcggcctgcgggcatttccgacgtcgtaatattggcgatgacggcaatctgatgataatcctgctgctgccactgaatattgcaggcggcggccagtttggaatgagaaccgtcggcagcaaccaatagctcagccgtcagtcgctcgccgttatccagtatcacgctggcgtgttctaccgttctctgtacatccacaaccttagcggggcaatgaagggtaacgcccggagccttagccagcagcgaaaacagacgctcaccgacgtcgtgcaactcgataacgttacctaaagcgggaacccgatagtcatcggcacgcagattaacaaaaccggcgtggccagtatcgctgacctgcacgtgggttatcgcagtggcacaatccgctagcgcgggccaaatgccggttcgctccaactgctgacaagtgccttgcgacaaagcaatcgcccgcccatcaaagcccggatgggcgcgatcgccaggtgcagtcgcttccaccaaagcgacttcgacctgacctttggtcaatgccgaaatcgccagagccagcgtcgcgccggccataccaccgccaacaataatgatactcatcgcttactttgccgccgccattaaagcttcaatatcttctgctcgtttcactacgcttgccgtcaggttttcattgccggtttcggtaattacaatatcgtcttcgatacgcacgccgatccctcggtatttcacaggcacatcggcatctggcgcgatatacagacccggctcgatggttaataccattcccggctttagaatacgtccgcggtcgctggtttcataatcgcccacatcatgcacatccatccccagccaatgactgagaccatgcataaagaacggacgatgagcctgctcggcaaacagctgctctacatcgccttttagaatacccaaatcaaccagtccgctgatcatgattcgcaccacgctatcgttcacttcgcggatgctgatgcccggtttgaacagttccagcgcggtttcaatagactctagtactatgtcatatatcgcgcgctgtggcggagagaacttgccgttgaccgggaaagtgcgagtaatatcaccggcatagccctgatattcacagcctgcatcaatcagtactaaatccccgtcccgcagctcacattcattttcggtgtagtggagaatgcaggcattctcgccgccgccaacaatggtgttataggcagggaaacgcgcgccgtggcgggtgaactcatgcagaatttccccttccaactggtattcaaatattcccgggcggcatttttgcatcgcacgagtatgtgccaaggcgctgatttcgccggcgcgtcgcatcacttgaatttcttccggcgatttgaacaaacgcatttcatgtagccacgggcgccaatcggtcagcgttgccggagcgcgcagatttttacggaaaccattacgcaactgttccaatgcggcaaagacgattttgtccgcataggcgtattcgccctgagcgtgataaatcacatccaacccattgaataataggtgcagttgctcatcaatttcatcaaatggcaaggcacgatcgacgccgagttttgccagtgcagcatcctgccccaagcgacgaccaaaccagatttccgccgttaaatcccgcacccgattaaacaacacgctgtgattgtgggtttcatcgcttttcaccaaaatcagcaccgcttcaggttcgttaaaaccggttaggtagctgaaatcgctattctgacgataaggatattcggagtctgcgctgcgggtggcctccggcgcggagaaaataattgctgcactggctggcgccatcttcgccaacaatgcctggcggcgattttgatattcttgctgagtcattaccttctcctgaaatctattgtatcgagtttgagaaacgatcaattaatctgggaaaacctctcagcctgtcgcaataacacacgccaggcagcccgcagggcgaatggactgtgccacgcgccgcaaatccgctgttagtgcagagtcggtttcggcaactcgaccgccgtcggcttctgctgagtgaattctatatggcacagcaatgccgcaactcgaacatattcagcgacttcttctaaagactgagccagttcttcctgatcttcatcttcgtcgtagccaagctgggcgatattacgcaggtcgtcaatggcttcgcccacttcgtctttcacctgagccagtttaggctgaagcatacccaatcccagcaagaagtgattaacccaaccagataacgcatcggcgcgatcgaatacgctgatttcatcgccttccggcagcatcaactggaacataaagccttcgttttcaagcgcttcttgcgtagattcatgcaattgttgcagtggcagacttagcgcctgcgggaaagccacgccttcgttggtcagctcatgaactagcgcttgccagccattatcttgactgccgccacacagcatcccgctgatcaggccatgcatttcggcaggagtaagggcgatggcctgctggttcagcgcctgagcaagagattggtaagttggtaatgtattctgtatggacatgcgtattcatcatcgttggcaggataagttcgtgttatgctaccaccaagatcagtcgctataccagaaaacgcaacgctataaaggggttgtatcttggtatcgaggtatatatagtggcgcccgctttgaccactaagggcaatttgcttatggtgttacagggctagcgcggaaattagtcaggaaggtggcatgtctgcacaaccggtagatattcaaatttttggtcgctcgttaagagttaattgtccgccagaacaacaagatgcgttgaacatggcggcagaagatcttaaccaacggttgcaagatcttaaagttcgcactagagtcaccaatactgagcagttagtttttatcgcggcattgaacgtatgtcacgaactggctcaggaaagattgaaaacgcgtgactatgcatccaatatggagcaacgtattaggatgttacaacagaccattgaacaagcgttgcttgaacagggtcgcatctctgaacgtcaggatgcacaatttgaataaatcgttgttgaatgatagattcgacagtgagtaaagaatttctctgaggtgttcgccagcgggccagtcccctgagccgatatttaataccaacagaatgttgtgatccgtaaccggtgagcatgctcggtccgccgagaagccttaaggtagcgacactgcgttcaccttgaaccaagggttcaagggttacagcctgcggcggcatctcggagatccctttatcaatcatgatgttgtgagatcatggttattcgataagttcgattcaatacaggcagcctatgcctttcgatccccagcacggtcctttacggcaacaaatcagaaacgacatccgccaacggcgacgcttgttaactccggaacaacaatacaattctgcccggctcgccagccaacaaatccagcgtcatccccgaattcagcaagctcgcagcattgcgctatttctctctttcgacggtgaactcaatacccaacctattattcagttgctctggcagcagaaaaaacaggtgtatcttccggttttacacccgttcagccgcggcaatttattgtttttacgctacgcgccggaaacgccgttagtactgaatcggctaaaaattcgtgagccacagttggatgttaaagaggttttgccactttctgagttggatatcatcattacgccactggtggcgtttgatcgtcacggacaacgtttaggaatgggcggcggattttacgatagaactttacaatactggcaacacaatggcccctaccctatcgggctagctcatgactgccagttagtggacgatttacccgtggaacactgggatattccgctgccggaaattattacgccatctcaggtatggcgctggtagtgactgaattatttaaaatttatcggcatctgctgataccgataaattgaataaaccgccatttcatccaatagacttcgcctctacgacgcaaaagatgaagggtatcgatggttagtagagcaaacgggcgcgaatagtccccggaatcgccttcattaattgcagagccgtttcagccctatcggtgccctgagtttccacatcgatcaccacataaccaatttccgagctggtttgcaggtactgcgctgcaatgttgattccctgctcggcaaaaatctggttaatgctggtcagaatacccggacggttttcatgaatatgtagcaaacggctggcattgtcaccgtgagcaggcagggaaacctctgggaaattaaccgccgaaagcgtggagccgttatcggaatacttagccagtttccccgccacttcatcgccgatattctcttgcgcttcttgcgttgagccgccgatatgcggagtcagcagcacgttatcaaattcacacagcggtgaattaaacggatcgctgttggttgcaggttcggtcgggaatacatctattgccgcaccggcaatatgattgctagccaaggcatcacacagcgctggaatatcgaccacggtgccgcgagaagcgttgatcagcagcgcgccgggcttcattagcgctaattgctctgcgcccatcatattgcgggtcgagcgagtttccggcacgtgcaggctgaccacatcgctcatgttcagcaaatcagaaagatggcgaacctgttgagcattgcccagcggcagcttgttttcgatatcatagaaaaagactttcatacccaggctttcggccagaataccaagctgggtaccgatatgaccgtaaccaatgatacccagttttttgccacgcgcttcataggagccagcggccagtttgtgccattcgccgcggtgggctttggcgttagccgcaggaatgccacggaacatgagcaacagctcgcctaacaccatttcagcgacggagcgggtgttggagaacggcgcattgaataccggaatgccgcgtttggtcgccgcgtttaaatcaacctgattagtgccgatacagaaacagccaaccgcgaccaatttctctgccgcagcaaaaacttcttccgtcagatgagtacgcgatcttaaaccgataaagtgagcatcacgaatcgattctttcaatgattctgtgtctaaggcacctttatggtattcgatattgctatatccggccgcacgaagattatcaaccgtgctttggtgaaccccttctactaacagaaacttaattctgtctttttccagtgatacttttgccatttccccaaccctattttcagacttcagatgcggctgcctttgtctatgaatctggctagcacccagtcaacataacaaatattacggcggcatcaatacaaacgattgcctggggttcagcacaaatttcactcaggcaggagttttgcggaagaaaacactgtgtaacagcaagttaacggcaggttaatggaatagagaacatcaatgtgacatatgtcactaaatttaacctttttaagaaaagatgattaatcgcaaaaaatactcgggataacgcgaaaacgtcatcccgatgacctattttaaccagtaaggcttattgagcagtgattgttttcacgccatctgcggtaccgaccaaagccacgtctgcaccacggttagcaaacagacccacggtgaccacgccagcaataccgttgattttattttctaacgcaatggcatccagaatatccagattatgtacgtccaagattacgttgccattatccgtcacaacattctggcgatattccggcaagccgcccagtttgaccaactcgcgcgccacgtaagaacgagccattggaatcacttcaaccggtaaggggaatttccccaacacatcaacctgtttagacgcatctacgatacagataaatttacgcgcaatagctgcaatgattttttcgcgggtcagcgccgcgccaccgcctttaatcatctgcatatggccgttgatttcatccgcaccgtcaacgtagatgtccaggtcgtcaacttcattactatcaaaaacgtggatgcccagacttttcagttttgccgttgaagcgtcagaactggaaactgcacctttaatctgatgtttaatcgagcctaaggcatcgataaaatgtgccgcagttgagccggtgccgacgccaacgatggtgtctggtttgacataatccaatgctgcccaacccactgcttttttaagttcgtcctgagtcatggtcatttcactgcctattaataatatgaaaacctgtcgctattatagaacatgcgggagggaaatctcgccaattaagcctgactcagatggtattaatccactctggatcacagatatgttcccgcacaaccgctgaatttccgttgatttttgccgcagcaaaatagataaactgtggcatagtgccttattaaacttattttggagagattactccgatgaaacgcccagactaccgaacgctgcaagcgctggacgcggtgatccgtgaacgcggctttgagcgcgcggcacaaaaactttgcatcacccaatcggcggtatctcaacgtattaaacagttggaaaacctgttcggtcagccattattagtacgtaccgtgcctccacgcccaacggagcaggggcagcgtctgctggcgctcttgcatcaggttgaattgctggaagaagaatggctgggtaacgacaacaccgtggatacgccgctgctactgtctctggcggttaacgccgacagcttggcaacctggttgcttcctgcgctaaaaccggtactggcggattcgcctattcgattgaatttacaggtagaagatgaaacccgaacgcaggaacgtctgcgtcgcggcgaagtcgttggcgctgtgagtatccaaccgcagcctttaccaagctgtctggtggatcaattgggtgcgctggattacctgttcgttgcctcaaaaagctttgccgagcgttacttccccaacggcgtgactcgtccggcgttactcaaagcaccagcggtcgcctttgaccatctggacgatatgcatcaggcatttttacagcagaattttgatttatcgccgggtagcgtcccttgccacatcgttaattcttcggaagcctttgtacaactggcgcgccaaggcaccacctgttgtatgattccgcacttgcagattgagaaagagctggagtcgggagagcttatcgatctgacgccgggattattacagcgccggatgctgtactggcatcgctttgcgccagaaagccggacaatgcgaaaagtgactgacgccctgttatcacatgggcgtcaggtattacggcaggattagtttcgcggttttatttcgccggattcagttggaataccacgtcgacctgatcgtcaaagtgaatggtctgctgctcataagtttgggcagcatcgcttgccatgcccgcttccggacttttatacatgcgcgctaccggcatgggctggtagttggccacgcgataacgaatactgtacaccggccccagagtagctttaaagccctgagctagagaaccggcctgagaaatcgcgttatcgatggctttcttacgcgcctgctcacggtaagtctctggattcgctacccctaattcaacggcgcgaatttcattcaaacccgatttgagcgcgccgtccagcaactcgttcagtttatccaactgacgtagagtaacctgaacctggcgcaccgcccggtaacctttcagtactgcttcgccggttttcttgtagtcgtattccggctgagtacgcaaatttgccgcattgatatctttcttctcaataccatttttcttcagaaaatcaaaatattgagccacacgagtatcaacctgtttcttcgcttctgcggcgtctttggcggttacgctaacttcaatcgccaaagtggcaatatccggcgtagcgtcaacgctggcggttcctgaagtcacaacgtgcggcccttccggcagctcagcggcctgcgaagccaaaggtaacgttcctaatcccatcattgcggccaaagccaaggtctttaacttcacggtgcctcctaaaaatatgccgatacgaaaaatcgctgcgaagcacggtttatcagtcaattacacctaagagcaagcttcttttcagttaattactcttactgacgaccggaatcatgcacaattattttgtcgcttagttaattcagtaacctaacaaagctagcacatcttttgccatgaagaattcagaatagtgataaaaaatcaaaaactcaggccttgtttagccaactgaaaggcaataaaccacatcacaccgccgactaacaaattgatccctctttgcgccgctgggcgattgagccagggagccagccacgcggccagcaacgccaaggcaaaaaaccaactgatagaggcactgaccgctcctaaagcgaaccatggtctgacatctggcaataactgaccgcccagactgcccagcaccacaaaggtatccagataaacatgcggattgagccaggttacggccagcagagtaacgatgattttccagcgatttttcacactgctgccttcaatcgtatcctgaatatctccacgccatgcagcgcacagcgctccccagccataccacaacaggaaagccacgccgccccaagttaccagtgccaaaagcagcggcgattggttgagtaaggcactaccaccgaaaataccaccacaaatcaggatgatatcgctcagcgcgcagagcgcagcgctcataatgtggtgctggcgcttaattccctgattcatcacaaaagcattttgcggccccagcggtaaaatcatcgcggcgcttaaagcaaaaccctgaagaaaaatggctaacatgttgttccctttagataatatccgctaatgtgcgaaccgattgcgagcatattacggcgagatagtcatcagaggaaatggatatttcttatccatgataagacgtgctaataatcaacgcggaaataaataagataattgacgttaagaagttaagaagttaagaagttaagaagttaaaaataagccgcccaataaaaaacgggccattcggcccgctgagaagcatttattgccagaaaccgcacaattactccgccgcttttttctctacctgatgcagatgcacatccatttgcgggaaaggaataccgatattatgggcatccaaagcgcgtttgaagttctccagcagatcccaataaacctccaatgcatcgccattggtggtccaaacgcgaacggtgaaattcagggaagaagcggccatttcgtttaaacgaacgatcacgcctttatcatgcaggatacgcttatccccagcgataatatcgcccagcacttttttaactacgtcgatatcagcgtcataagccacgccaacggtaatatcggtgcggcgattaggttctcggctggtattaatgatgttgttggcaataattttaccattcggtactacgatgattttgtcatctacggtacgcagcgtggtagaaaaaatctgaacctgcaccaccgtaccggcgacgccgcctaaatcaacgtattcgccagcgcggaacggacggaaggcaaccagcagcaccccggccgcaaagttggacagcgagccttgcagcgccaaacctacggctaaaccggcggcaccgataacggcaatcactgaagcggtttgaacgcccagacgtcccaacacggcaacgatagtgaaggccagaatactgtaacgcaccatcgccgctaaaaagtcagcgacggtaatatcaataccacgcagacgcattacccggtttaccgcgccggaaaccactttggcgatgaccgaaccaacgatcaaaatcaataatgccgcaatcaggtttaccgcatattgaatcagcaaatcttgattgttcgtcaaccaggtgcttgcattattaatgccgtcaacgacgtttaactcttccatttttatcatcctacgaagttctcccaacctagagaaaattgcacaaaaacttccgccagccatcgaccggcatcgcatttaacccgttgagggtaacgaactatggacgcggttgccaactttgacagaaaaacaacaccaacagaatcagacttattacctaaaactcaccggataaaccgccatgattacggtatttctccgttggatacgctagaaaagaaaaaggctcctacaggagtattgtttttttgtttaataccatgaaataaaaggatttatttctttcaatgtccacacattgaccacatcaagttagagtcatactttaattacgacaaaacgcccgtatttgcgggcgtttttacttatcactatttcaggtgaaaaaattcagctaaaagcaggatttgaattcgataagtatttcatgctgtcagaacatcaacacttgcccgcctgcttgcgggtgaggcggtaccggatttatttcccctggcgtagaaatcgaacgcataaaactttccatcgtcacaaaggtatggccgcaattcacattggtgcactggtgatagcgttctttggtttcgatggtgatctggctgctgctgcgggtatgggctgcgctgtggcataaagggcaattgaacatgatccggactccggcatcatcccggctatggccggtgttaatgataattatgcgtgattgttgattcaaaatcatcattccatatccaaatcatctattttcacctctaattccagcgcggtagtaaagccgctgtcattcacggaatgagtgaccgtgaccaacgtccagtcggcgtcatctatctgttttttaaagccagtgactttaatcggcacttcggggtagagagcggctcgccccctggctaactgaatggagaacttggccgcgccgcgttgcagccgttcccaattggatttagccgctcgctgcgcattgtgtttgttggcgtaagtggtgcgcaaggtcagcacattctcatcagtgccgatcagatattcaccttgtttcgcttcgggttctttgggcttggcggtagtggtcgccttgcgtttacgctttcgttttaccttaaccactggtttttccgtggtacgggtattcaaccagttagccaccacgccggtataagcgccccggtcagccatactaaattgatggccgtcacccaaactgcggataatagtcatcactggaataggtttaccgctggcggttttcgcctgaccttgtttgataaataacagattgcccttttttacggcggcaatagccccgtattgttttgccagtcgggtaattaaattgccgtctgattcgttggtttggtctatatgttcgacgattaaatcagacatggccttatttaatgtgggtgtgagtttattgcgctcggcaattatcttcattatcccgccaatggtggttttatgataagactgatcgcggcgaatattgagcgtttcacgaaaatccgcactgcgggcgcgaatagtcagcttatccggtgcgccgctgtgctctatttcatccacggtaaaggtgcctttatcaatcaaggccgccccttgccagcctagcgcaagcgctattttagcccctcggcggggcagcactaactggccgtctgaatcatccagttcaatatcaagctggtcggcctcaaaaccgcgattatcggttagggttaatgacatcagtcgctttttaatgccgccgcttttatcgataccatccacggtaatagcataatccggcgcgttatgaccgctattggacaggatatcaatcatgataataacccgctggcggtgtcagagatttgcgcggcaatatcatcaaattgctgtgataaatcaccaaacatttcttttaaggattcatcagtgcgttttagcgtcagcgtgaattcaatcttgcgcgctgaaccatcactgaaaaagatacttttggtacggctaagattctcaatcacaaacatgccgtgaatggcaccgttcccctcaatcagtgaccaggctttgccggtttcagccatcaactgcaaggccatgagcgaggctttaccgccagtcagttcagggtatagcacaccggataaggttatcgattcttcatctggccccaaaaactgactgattggccgcaagccgatgcgggcatttgtcgggtgacgccatgccatttgatgctgaaaatcttgataggggacggtttgcaacataaagacaaacatccctaatgccatcatcataagtcgctccttaatcaatatcccgataactgctgttcatttttgccctggcgctgcgctcaagggcgctcaactggcgggcaatttcccgcgcaatatctattggagaatcattgggttgggcgataacctgaatgggtgcattgatatgcaccggcgtttctttgattatcgtcgtgtgagtctggtgggtggctcccgcctgagtcggcggcaggctatagggatgcatcggcgcggcagccgcctctccgccgctgaacatcagagcggcagcggttgccatcgtcgcggtgtttctgcggctggtgacattcaccgggccactgacaatctccggcccatactctcccactacgccaaattttcccaatgggatacgtccgcccgcgtcatgctcgccggtaaatcttttgcgaatagcctcggcgctgtgaccgattggcgtcggggcaaacgtgacaccggcggcctgagcggcagcggcaacccccggatgggttgctgccagcgctttggttttctccgaccgttcccgcacctcatccagtttttttagtacccattggatagagtcggtcagggccttcatcggggtcagcgccagatggataccgtccgccagaaattggccgaatgctttaccggcatcagcggctccgtttaaatcgcgcgtggtggattgcaccggttccagtagtttcttgaaccagccccagacctttttcaccccgttggcgatccactcaaaaacgggggccagtggcttgaaggcttctttaatcggcgcggcagcttgccgaaatccgtcaacaacgcctctcagaaatgccttaatcggttgccagtattggtaaatcagcaagccaacgccggcgattgccataccaatcaaaccaattggactgagtaaaacacccaaaacactggatacgctgaccagggcgaaacgcaggaatttaagcggggattttgccagccaggcgaggccgcgaccgagcattttaaatgccccaatacccgactgaaccggtgatttcgccacattaaccagcgcaccgcccagacttttgagggattgcaccccgttttttccggcatggcgcgacatggacaatatcgactggccgaaattgccaaattggcgggcggtgatcggggtggtgctggcgagacgggacatgcccgcagacaaattgggcaataagcgaatacccaacacgcgggtactgaaacgcagcaaggccagcggccccaaaatccccactacggcaatcgccagtgccccaaaagcggttgttgttatcgcgatagcggcaccaatctttacaacggcttggctgatttgcgggtgtgctttgaggaattcggccacgccgtgcataaattcgctgatgccttttgccgcagagcgcagccagtcgttatttttctcgaacagctcaacgctgatattttccatggccgcgtgcaatatggtcatatcaccggtcaggttatccagcatggtggaggaaacccgttttgcctcgccgtcatactcgcccggctggccgcgcattttcccaagagaaccattaccggcagcatgcattagcacaccgaacccagtcactgcatattgcccggcgatatctttaaaaatagcaccgcgctcaacgttgcccatcttgccggttttctcattgatatctttgaggatatccactaaatcacgcatattgccgttcttgtccgaggttttcacccccagatcggacacggccttggagccaccaatacggcttaaaatactgcgcatggtagtaccagcctgactgccctgaataccggcgctgccgagcattgccgtggaagccgcgacggtctccagactctgcccgtactcccggccaacacccgcagagtatttcagcgactctcccagcatcggaatgtccacgttatttcgggtaaataacgcggtgaggacgtcagcaacgtgatccatcttctcggcggggatccccatcgctgtttgaatgttagaggcgatatcggcggtggtgcctaaatcaatatccccggcggcggccagatttaacatgcccggcatcgcgcccaaaacctgcttaggtgaataaccggtacgaccaagaaaatattggccctgcgcgacttccagatcggtaaatttggaggacagcggcaacgttcgggcctgctggcgcatggcctgcatatcggctgagttcttatcggggatgcgggtcaccgcctgagttttactcatcatggcgtcaaagtcataacccacatgcaacgctccggcgatccctcttcccatcgctttacccgttgccatggaggtatagcctaatccggccgccaaggctttgcgctgattgctggcatcaaaatgattacgagcctgattaagccgttgttgttgctgagcctgttgctccagacgccgctgttggctgactagcgcggcagtggtgctggaaatattggcttttaagctgcgctgggcgtcacccagtcggtgagtggcaataccgctattttgcagggcgctacgctgatgatgcaaagaggtccgcaactcgctgtatttctgtttaagtttactggcttcctgtctggccttttgaaactggcgggcctgtttggcggtggtgcccccggaatttctcgccgcgatatcatactggcgtactttttcgcgggctgccgccagcgcctgagccgcaccgataacggcggctttagtctgacgaaatccctcaatactggccgactggttattcagctgctttaactggtctttggtggctttaatggcgacggccagcgttttattgctggcctgaatggatttaaacgggcgggtaactttatcgactgcgctaagtagaatctgcaagcgaaggtttttatcactcatcactgcctccgttgcggatcacggctttatgtcgccatgctaataattcacctaatgacatgggatcggtgacggtgggcggccagtgaaaaatgaccgcgatatccgccgtcaggtcgtctaccgtcaggctgtcaggaaatcggatttgaccgaattcggtaagaaaaaaagcgccacggcgttcgccaactgatacatatccgccggatcgaggttgctcacttcctgcgtggtcagatttggcgtggtgacgcggggcagcaccttaatcagcgaatctacatcggtatccagtagtgcctgaagtttggctccgcgcagtgccccggcattgggtttattaaccgtgacctcggtaatggtggtattgccacgcacaataggtacatccagtgtaatggtgttgaactggtctaaatcagtgagggtttcgtcggtcacttctgggggtgtcacagtttttttcatggtcatcatccaaaggaaaaagggaatagcggcgcgggttaacgtgccagaaaattacaggccgatattgcgacggtgggcttcgagcctatcttcgccgttgaccatttcgaccatattcacggtatcgatctcgatcagcacttcgccgtcccacgtcaatttgtagtagacgcatttggtggcgatttttaccgtggagctatcgccctgtttgctgtcgccggggtcgatttcctcatgacggcctcgcaccaccacttctaccgcgtgggtttcgccggtgtcgtcccgttggtaggaaccgacaaagcgcagcatcacgccgtcaactttggtcacgccccattgtttgtaaacctcggcatcgataccgcccagcgtccagtccacattcagggcatcatcggccagccccaaatccaccttggcgctgccgttcatgccgccaccgcgataatcttcaaatttgcggcccagcttgggcaaagtaagtgattcgatcacgccctgatagctgttcccggcgttgaataaattcaggtatttcagtttgcgtggtaaggccataatgtcggttccttagctgttaacagattgggcgaagttggccagatagcgatcggtgatgcgctggcgcagcatcaaatcttccagcgggggtactggcgtgtagtcgtaatcaataaacaggcgacccgctttgagggtgtctttgctgttgacgtcctcgtcataccagcaatcgccatcgatgatgtaaccctgtgatttcagctcgcgcattttggcgcggataccttcaataatgtctttggccatcgaaggattgagcgcgccatcaatggcccacatctgcgcgtcggccatcgtatcggccatcacctgcgcggtacgggtgtagttttcaaaggcaaacagcggatcatctgagcaactacgggaaccccagaagcggtaaccgtctttgcgcactaaggtagtgatgtcgtggctgttgagcaggtcagcatcggtggccgtgttctgtaaatcccaaaacacgtcggcgctaataccggtgacgccgttcacaccgacgttagacagggttttatgccagccggtttgctggtcaattttggcgcgtaagcctagggcgcgggcagtggcgtaagccgtggtttcgccattcgtgacgctatcccaactgaggaaatccggccagatcagcatggcttcacgctggctgaaattctcccggtacttcatcgcgtcttccatggtcttgcagccgtgggcgctgatataagcgaaagctcgcagattctgcgcgacggataataattcggtggataccgctagggtgtcatgaccgggtacacccaagatgcgtggctgtacgccgagttttccctgagcggctaacagggctttcatgccagttttgcggccgtcgggtgtggctccaccgataatattggaggtggtttcggcttcagtttcgccctgagccacgcgaacaaccacggtcagcggacgggtttggtcactgatggcatccagcgaacgggctaaggtgccggtttcgcccgctttgccgctggcggccagcacatcggtgagcaaaacgggggtattcaggggaaaggctttggcgtcggcatcatcggaggtacagaccattccgaccaccgccgtgctgacggtgcgaattgggcgagtgccttcgttaatttcaatcacgcgcgcgccatgatgataatcggttgacatggtttttctccggttaagcgttcaggcgctatgatgccggattgttgagcacggagcaggtgatgggtgttgtgtgggagatggcacaagagaggaatagaaaaccccggccagcggggctaaaaatcagtcttccggcaccaagaccgggataatatcgcgttacccctcaacataaatacataccctattacgattgcctctctgccccaaccagtatcgccgaaacctcattagacagcgtagtcatatccgccagtacgccggtgacgccctccggcttgaccatgtacggcagtaccagactgccattttttaccgcgctatcaacgcttgccagtgtatccgcgacgggctgcgccgccgctttaatgtccgcaagggttttggcctgtgcgatagacaccgcaagctgtgagacattcaccagtatcaggctcagcacatcagccaaaacgccctcccgcgaacgggtatccgctatcgtctcaatctgctgacgtaccaacattcgcacccgcaccgcgtcctgagactccagcccccggctggtaacgacataaccgccgctgcgatcagagtgcggcatcatttctttattgcttaacgtattcatttttacacctttattgtgttctgatggcttcgccgaggccgagattaaacagttgcggacaacgatggtcagggttccatctgcccgggatgatctgcggtaaggcaagataaagtacatctcccaccgcaggattacccgctaccccaatatccacatggctgtagttcccggcagcattaccactgaataagtgatgagtatgttggtgccaacggcctttaacctcgttgtggcaccaagaccagtcagcgccaccgataatcttgtaatacagcacaaaactcataaaacagccggtcggaatatgctggcttggaatatggaaagcgtaagggccaaatccgtcgatagtctttttgatggtgactttcataatgttgaatgcaccgtgaaaatggagcctatccattcccatgtactgcaataattcgcgcacaatcggcgcacgggtttccggcgctaccccagaagcgacggggatcatttcaatgtcgaacttatcccagaaatgaccgccggcatgtaatcccatacccaccggcaactgttgcggcggtattccggccaaatcgttcagggcggcgtttttattaacggccaaggctgaatgctcgtgtacctgcacatactggtcatgagggttagtgctgcgaacgtgatcggataatgccgtgacggaagcattagccgcagccttaaccgctctcggcgtcgccgcctcggtttcactgttgctgtcggtggcattgctcagggtgacaaagcctttctcgcttaacgtcgcatcgggatgattgcgggatttggcatggtcggccagcacgttatccgcgtactgcttaacctcaatcaccttatcatcgacatatttccgcgtcgccagtaccaccgacgggtcgattttcaatgtcaccgcttcggtgctgctgacaatcaaaatcatccgaatggtttgagtgcggccactgccttcctgtagttgcggtttgtaggtttcggcgcagttggcaatggcgaccaaatccccggcactgtcgtacaggccgatttcacggatccaccaaccgccctcattctctgggataacctgctcggcaataatctggctggtattgacagggtcaatgctcaaggcattcagcgctgcccggcgtttctcgccgataagctgggtttgtgctggattgggtgcgggtaaagcaccgcctccgtcgcccacggccatttgggtgatgtctaatcgggtgccgagcgcggtggcgttcgccagtttggccgccccgacgtgggtcagaagtgcatagaatctagcggtcatggttcacgctcatctcatcaatcatatgaatggtgccgccggtgtattcgctgccggtgacggtgataacttcgggtaaataggggtaaacggtcagctcgtcgccgctgtaacaacccgcgccaacgtaaaactggccgctgctgtccagatttatcgacaggccaatcaggtgacggctggccggtttggcgtcgtcaatcaggcgctccagttcgcggtacatttcttcggtaataccggtttccagcacgccgacatcaaggcgaaaagtgccggggatgtcgccggttttccaccactccagcaccttaatcagatagcccagcggctcgaccacgcgacggatagcgctgatggtgcctttgtgtttgtgaacgtaaaacgaggcgcgcaccacgctgcgcttggtcgcttccggccagctctcatcccagcgatccaccgaccacgcccaggctaaataaggcaataacggcagcgggcaggtgtcgggatcccatagctggcgcagtggcaccggcacatcggcaatcaccgtgcaggctgcggcggcggcgatttccagaggcgaggaaccggcaggcaataggcggttattcatccgacccgccgatcgccaaggtgtagccggtgcagtaggcggcctgagttttatccagcaccacatcggccagcggtgcggccagttcgacccgctgcacaccttccacatgcagggcggcatagatggccgataaacgaatatcacggcctaaacggtgctgggcgttgacgtaggcggccagtttgtcggcggcggcacggcgaatgggttcggcttccggccccggaaacagatagagtctggcgtcaatctggtaatcgacaatcacagcggattgcaccgtcacccggtcagccactggccgtacattctcatcgtttaacgccgcatccactttggcgagcagttctgccgacgccacgccgttgttttcgcgcgataataccgtgacagtcacgcaggccggggacggactcagcgccgaggcatcggctacccgaccgtcggcgctgcgggcgtgaaactcataggccccggtcggcccagccacgctcagaccttcaaaggcttgcgggatgcgcacccgaaaatcggcgtcggattccatcacggcggccaatggcggaatggcggttaaatctgccggggtgataagcaggcgctcgacgccattattggcacctaactgatcgaggtcgctgccattggcgtaagccaccatcaccgcctgcgcagcttcgttgactcgctggcgtagcagcaattctaaataagcgctttcctgcaatagcttaacgatgggttcggattcaaaggacaacgtcacccgcactgccgcctgttgttcagtaggataaagtgcaataaaggccgctttgcgctgattaagtaacgcttcaaattccagtgattccaccacctgcggcgcgggcagcagacttaaatcaatggtcgccattattgcccccttaacgggatagagagactgaggcgttcggcgctatccgagcggttgccgaacagttccaccgtcatttttccgctgttttcagtcgtgagatcaatcgccgtcagcgtcacgcggggttcccagcgcatgactgcgccatacaccgccgccatcattttgagccgtaaggcggggttctgcggctgatcaatcagcgtggacagcagcgaaccgtattcccgacgcatcactctggagccttgcggcgtgattaaaatatcgctgatagactggcgaatgtgagccatatcggtaatggctttgcctgtctgcgcattcatgccgagataagtcattgcggccccccggaggaatcaccgccacctttgacgccgccgtgttgatgggtgtgaaccacaataccgtttgaggtcagattgccaccggaatggttaaagtggcctcgcgcctcgccgccttcttcaatcagaagggttcgggtaatcaggtgttgagtacatttcaccactggcgtggtgagggtgatcgaggtttcggccacgatattggcggttttcatgccggtaatggctaaatgacgggttgcaggttcatattcaaatctggccccatcgggaaaagtcactacgatggcatccgctgaagccgagggtgccggattgctatcggaaaacaccgcgggcaacacaaaagcggtggtgagttcgccgccgatactgaggataatcacctgttcccccaccgagggcgcagcccaaaagcgcacccgaccggcgcggggcgtcagccagttcaaccagtcggtttctagctcgcccatttttacccgacataaacctttgaccgtatccacttcggatacaatgccgatgcggatcagattcgccagggcgcgtttaagtgctgcaataagcgttttcattcagccagtatgccgcgtgcgggcgcgactggcatgtgataggggttgtgtgagggatggcacaaagaattaactgcaaaaagaataaacgcgtgtattaaaggttaatcaaaatgtgaacaatatgggggttcggtaatacatcaggtgcatctaatgactaaaccctgtaacctccctacgttttattattttaaagggactttaaatggctaattcaatttatttgacattgcaagggactaagcaaggtttaatatccgcaggttgtggctcattagattctattgggaatcagtatcagtcaatgcatcaagatcaaatttttgtttactccttacaacacatgatatctcgcgctcaaaactccaatcatcatccgatagtttttagaaaaccgatcgacaaatcatcgcctttgctgggattatctatttccgagaacgagagtcttcactgtactttcgatttttatcgaacaaataacgcgggttctcaggagaagtattacaccatcgaattgactaatgcggcactaacaaatatccatgttgattatcctcactcactgacccatgcaggtatgcaaccggaagaacatgtatcagttcgctatgaaagtattatctggcagcatcatgttgccggtacatcagcatatagcatttggaatgaccgcgttttataaggattatcttgtggatgagattaataccatatccaacaaaatcgtagcgtcctttgaacctgatggtgtccctgaaagcatatgggctggggttatgtcagtcccgcaggatatctattatctgacgcgtggcgttatggatacagaacaccgaagccaaaattccaatcactttcaccggttggcaacttttataaaaaatggagatattgatagtgcaatagtaagactggttgaaacaattgccagagactttatcgataggcttcccgaagataaaaaagacgcgctgttaaatagcatttatgcgaaagttggctcccgctttggtacaacaactacactcatgtatttgttaacttcacgaatgaatagatcaatagcaatgcaccctaaattaaaagcatctttgggtatttttcggggcgcggcgataaactccatattgaccgcaggtgcattggcaaaccactcagcttatgactccagagagctgagagaacaaaacccaagattatattggcgtttacgttctatgggcgaactggacatattgtattttttaattaaagattcagtgtctggctatgtggaggccagcggtatgcaagagcagggacgagatgatgaatacaggaggataatagataatgtcatcaaccaactcaacggttaaaaaaatcttagtcggttttctatattatctttcttatatggcggcaaataccgttgctatgatcgcaatagtattgatggttacatcatttttctattttgaacattggtatgtcgccatattagcttgcgtgggtatttttgcggtttaccactttatattgtatttattcccgcaaagaccagattaataactacttcgcaatatgccccaacgccagatccccaatccactctacatcgccgtcggttagccctagcaactggcggcgttcatattttaccgttggcccgttgcggctgattttatcccgcaggccgtagtgatggactctgaccatatgattaacctgcccgctaaaggtcactgccgcctcgtccgccgtggcttcggttttcataaaacgggcggtgcgcaagcgggtaaacattttgcgcttaatccgcccccgtttgtcgcggcgttttttcttacgcggtaagaacggtgagccgtccgggttctgctgggcctgaatatgctgttgctgtttttcccgcagttgtttggcaacctggcgggtaaaccgggtgcgcccctgtggggaaagttgagccagtaaaatagacagcgtgttatccagctcatgaaaatcactcatcgtgcccactccgcgaccttttcgccctgaatataaatctggtaactatccagcaacgcataaggctctggcggttcatccagatgggtgacgtttaacgcgccgttttcttctttgactatcacccgctcggtgagtttcaactcaatgctgatatccctgacagttttatcaataaaatcaatctcgaaggtaaaaccgtcctgacgcttatcctggctggccatcatgcccggttggtgtttgcgcagccagtgtaagatcgtcaccatcagcaaatccatgtcatggccataatcagtcatcaccagattaagggtgtagcgatattcaaaagacagcgacggggccagcgtggaaacaatcgctccgcgatcgataaacacatgcaggcagtcggggttttgtctgacgtaggcgctggctttcatcaccgcgtcccgcagggagtcaggttttagcatgttattgctccagtttacgtaaaggtttcaggcaaatagtgcgaatatagccctgtaaaccggctatttgctggtcggcggtggcgatgcgttgccggagatcgaaataatgccgttcagcggcgtcagtaagtcggggccgggcagcatcagccacgctgggggcgcgggcggttcgctggctatcgggcaagggacaggcggtgttaaactgcaagcgctgagtaccagcggccacagcacggcgcaaatcgtcaatggtggcttgggcatgagccagttcctcggtgtgttgtttatccagtgcggcgacctgttgttgttgttgccgctgtctggcaatggcgcgattggccgttttcagcgcttgctggttttggcgggcgctatcacgccagctttcggcttgccgctggtagtgtcgggccgtcagagctgaaccacccaatgccagcaataacaccaggccaatcaacaatgttaatcggttaggcatagttcgcgctccgcttcccgccgctccggctgaccggcgcagttattcgcccggatacggcaatctttgccaccgtcaaaaatccatttgctgatttcgtgacaggcacccacgcgatccccggcattcatcttgcggaaaaaggtcgaatgacggcattttccgataccaatgttgtaggcgcaaaagctggccactccggctttttgcggatcactgagcggcaccgtgatgtagcgttcgaccaacgccagtgctttctgagcttcagccagattaaaacggtcacactgcgcagcggtcaatgtcatccccatcacaaccggctttccgtcgataaccgtcaacccccggcaaatcgtgggtgatccgctgccatcccggtaagcattcaggcggttgccttctttctcatccagaaactgagagaaaatcaccaccgaactggctccggccaggatcagcccctgaacggctttactcagtcggctcatgattggctccctgaataagctgttgtcgtttgatttcatagattgcttgctggcgtatatcttcccgccgcttgtaataacggttagtcagataagtgccgacgcccagcaaaataccgataaaggtggcccagtcttgcagcgtccaggcaccaaataaggtcagcacccaggcggccagaaaagaggcccatgacgtgtgtttatccactgttttctccctgggcgcggcgctaatcccaaagttgtaaaagttgtgaggtcgccgctggcgtgatatccggcatcgtgaccgggtagccgtggggcaaaatcggccctctgtctgccaatcccggattcgcggctaacacctgctcggtgacaccggcagtccgcccgtaatagcgccaacacagggcgtctaccgtgtcattttgctgagccagaatgcgcatcagatcaattcgcaggtcatacgattgatagcctgaatatcgttaatcgcccaggccgcatcacggcgcagcgcatcaatggtggtttccagtgaatcggcccgtttactgccggagccggtggcgtcgatactgcgaaaacgctcggttaaactggcctgcatcaggcaatacaccgctcggcggtaaagttggacattgacgctttccccgtctaactggctggccggaacggtcgtcaggctaaaataaccctgtttctgccgggcgcgttgccagtcagccaaacgccgattcgtttcgtggatggcaaaacgtgcagcctcaatcactcgcggctggctcaaagtgccgtcctgtcgcatatcatcccggtatttgttcaggtcgatatccggccagaactcggtgtttttaatcatcgtctggccgctatcactgacgggggatttatccctgtccgggctgggctggagcacaacgttcattgtgatgttctcaagtaagtgggcggtggacggcaaccttgtcagagtaaaaatattctgactcggctaccgtgccgcccccgccgtggcgtttgggttacgcagcctggatcagtttctcaagctgcttgatgtctgtttttacgccgctgttttcatccagccgtagcgcttcgttcaggtttgccagggcgagtacgttgtccccgtcctgccgcaaggcgtagccgacaaacttatgcagccgggctttcaccgcatcgggcatatcccgcccggttaatagttcccgcgcccgcatcagttgggcggtatccagcggcgctttatcggtcaggtcacgttgtgctgcggttgtcagcagctcggccaccagacaggcggtggtgcggctgaaatcttccggcgtcaccaaatcatggcgtaaggcgtattcagcaatatccagcccgctggcaatatcgcccacgtccatatgccaaatcagcatgcgcattaacaccgcgtcctgtccgccatgacctttcgccagcacaccggcgacccacggttgataggtcggcaacatgcgccgcttcacctcggctttacccagatgagactccaccttgtgaagctggcccatatcctgccgcagcttgaacagcagcagatcgtaagtgctggcgtggttcaggctggcggcttcgctcaacgaatcagactgttgagccgccacaaatagccggtgccgacgggcggggttggtcatgatggattactcccccgttggtgcgtctggaatgaccggcgcggagaaatcaccgagctgaatgttttcaatcagcgcaacacagccgaaatcttcaatcacataggcttcattgaccgattcgaagttttccacccggtcacgtttcgggttgtcgataatggcgcggcggcgggtgccgtcttgccagtaaatagacaggttatccaaacgggtgatcagaatggtgtcgggcgggaagtgtggtgcgcgcacagccggtaaaccgccaatacgtttctgactgataatcaggtctgcggccatcgtttcgctgttgggctggatctggttaacgatcgggaaatacttgtcggccagcagggaacggccgcaaatagccaccagttcggtgtcgtcctggaaccagctttcaaccagctcattgacggctgacatcaccagcgcatccatgttgttatagtcaccgcctttaccgatgcggattttagccgataccactttgccgtcctcatccacaattttatccatcacatgctccggcgcatcttcccggacggcctgcaaccagccacggttaacgtcttgcaataagggattttcggttggatctgaggttttcgctcgcgctttgccgttaaagccgatcatgatgcggtcgagtgcctggcgtttaacgatagagtcgcggatacggatttggaagtcggggaacttggcccacatatccagcttggcgtaaggcaaggcggtatcaaagttagtctggccgcacttgtagccattgctatcaagactggttggatcggtcggttcacgctctttttcatgggtattggtggtgctggcaatcgggcgctcaatacctaaaccgattttatcgccttccttttcatccaccggataaacgttgattttggacagaaaggtgctgctttcctgttgtttggtttccagcttctgcgccaccgaaggctcaacggtaaatttggcctcgacgtcagtcacatcactcaacgcattcagagcagccacttgctggacgaactgcttatatttactgcgggtcgtatttttcatgggaaattaactccttaacaatcggtcagcagggcgttttcgttacccgtcgccgcaggtcgctggctaaattggcgatcggttttgccgagttgggttttcagttcggtcagtgcctgttgggtggcggcatggtcagctttcaacgcggtgaaagcggtttccagtgtgctcaacgccgtgagtttttcttccagttgctgcgccactaattccaccgcctgatgcacatcactgaagcgagcgtcatccgtggtctgttttttggtgaacatggctttgatttggctaaacagcgccggtttctgctcggtttcagtctcgaattccagcgtgatttcatcggccacgctgaaaatggcgtcggcctggcttttacgtgaagccaacgggttattggcgctttgggcgcagaaggtcaggatttccgcccccagtgacgccggggtatcggtaaaggcgatgccggtcagataggctttgccggtgtctgcgaatttctccacgtactcaatgctggagtacaccttctggcgggactcgcgcagcttgaccaaatcgtccgtcgcatccacttgcaccagtagcgccaatttgcccttaagtgggccgtctttgatttcttcatatttggcggcggtaatatcgccgtaagcgcggaatgggctgtcgggcagcacacttttaatgtgctccagattggcgcgggcgccgcgaaacgtcgggttatagctttcagccatttcaacaatgtgctgacggggaataaggcgcccgtcgctggttgcaccctcgacaacggcgcggaaaaacttggatttaggcatggcatgaattccggtttgggatggtatggccttatgttggcaaccggcgtcaaacggaacaatgaagcgctgttgtgtcagggctggcacaaggcgtaatacgagatggaggcgtagcggataggtagccttgcggcatgaaaggttactgcacaggcagattgaatatggatagtgtcactatcaatgccgatttagatccccgccgtcaagccaagtatctgtactggcaagggctgaggattgcccgcattgcggagatgatcggtgagaaggctgtcacggtacacagttggaagcgccgcgacaagtgggacgattacggcccattggatcagatgcaactgaccacggcagcggagtattgccgattggtcatgaagccggtgaaagaggcaaaagactacaaagaaatcgacttgttggcgcgtcaggccgaacggcacgcccgtatcggtaaatataacaacggtggcaatgaggcggtgctcaatcccaatcttgaaaaccgtaacagtgggccacgcaaggcagcggaaaagaacagctttagcccggagcaggccagcaagctgaaagatatttttcttgaatccatgtttgactatcagcgtggctggtatcaggccggtttatcgaaagagtttcgtatccgcaacctgctcaaatcccgccagattggggcaacctacttcttcgcctgggaagccttgctggatgccatcgaaaccggccgcaatcagatgtttgtttccgcctccaaagcccaggcgcaccaatttaaaaactacatcgtagccgccgcccgtcaggtagaggtagacctgcgcggggaagtgattattttgcctaacggagcagaaatgcacttcttaggcaccaactccagcaccgcccaggggcgtccgggcaatctgtatctggatgagtatttttggatacccggcttcagtaaattgcgccgcgccgcttccggtatggcttcacagaagaaataccgctcgacctatttctccacgccctccaccaccactcacgaagcctataaattctggaatggcaccctgtttaacaaagggaaagcccgagaccggcagcgggaaattgacgtgacctattcccgcctcgccgggggcaagctgtgtgaggataaacagtaccggcagatcgtcaatattgaagacgccgaacgcggcggctgcaatctgtttgatattgatgagctacgtaatgaaaacagtgatgaagattttgacaacctgttcatgtgcaactttatcgacgataccgcctcggtattttccatgcaggaaatgcagcgctgcatggtggatagctgggaagtgtggaaagacgtaggtttgttatccctgcgcccctttggtgagcgtccggtatggattggttacgacccggccagcaccggcgacagtgccgggtgcgcggtagttgcgccgccattggtgccgggcggtaaattccgcgtactggagcgccaccagtggaaaggaatggatttcgcggtgcaggcggccaatatcaaggcgctgaccgatcgctataacgtgacctatatcggcattgatgataccggactgggccgatccgtcacccagctagtgcgccagttcttcccggcggttcgcgccattcactacagcgtcgagatgaaaaccgacctgatttataaagccaaaaacgtcattaccaccgggcggctggagtttgacgccggttgtctggatatcgctaccgcttttatgtctgtgcgcaaagccatgacacccagcggcaggcaggccacctatgtgaccgatcgggctgaaggcaccagccacggcgatgtagcctgggccattatgcacactctgtttaatgaacccctcgaagggattaacggtaataacaccagtatcatggagatattttaatgcgtcagcgcaaccgcaataagcaatcagggcaagctactgccgcacgaggacagaacgacggccagcgagccgaggcgtttacttttggcgatcccattccgatgctggatcagcgggatattctggattatctggaatgttcgcaggtcgatcgctggtacgagccgccggtgtcttttaatggtctggcgaaatctttccgcgccgccgttcaccacagttcgcctatctacatgaagcgcaatgtgctggttagtctgtttgagccgcacccgctgttatccaaacaggattttagccgctacgcgctggattttttggtgtttgccaattcatttttggaagcccgctataaccggctgggcggattaatgaaactcacacccagcccagctaaatacacccgccggggtctggacactgacacttattggtatgtgcaatcctggacggaaccgtaccagtttgagccgggtcatgtgtttcatctgcttgacccggatattaatcaggaaatttacggcgtgccggaatatctggcctcgttaaattcgacctggcttaatgaggccgccaccttattccgccgcaaatattatctgaacggcagtcacgccggttttattctgtatatgaacgatgccgcccataaacaggaggatatcgacaagctgcgcaacgccctgaaagaatccaaagggccgggaaacttccgcaatctgtttatgtatgcgcctgccggtaaaaaagacggtttgcaggttatcccactcgccgaagtcgcggccaaagacgaatttatgaatattaaaaacgtcacccgcgacgaccagctcgccgcccagcgtgtgccaccgcagctcatgggtatcctccccaacaataccggcggattcggcgacgtagaaaaagccgcgcgggtatttgccatcaacgaactggctccgctacaggagcggctcagtgaactcaatgagtgggttggggaggaggtgataaggtttaggccttatgagttgttggtttaactatttccagtaggattactatcaccatgtggggctggttctataggtgtgaataaaatagaactggctttgctgtttttattaaaatgctcaacaaattccttgcagttatgtatgcaaacaaatgacgccacacatctaaaaacaaacaacatgcttagccccataatacatatgtttattataatttttagcagattaagtatatgttctgaggatttcaggttaattccagagacactgggcattgtattttcagtaatatcaagaaacaagaagccccacaatgaaacaagtgataaataacatataaacaatagtgcttgccataagattctttttataaaactatcaaatttctttgcgaatctggcgacgcctaagtcatctatataacaagtattgacgaagcgcttactattttcaaatagaaatatagagtacccagagttattcgagcgtaatagaagatctatctctcggtagccaacattcatacatttagttttatagaaaaatactctttcaactaaatatctgcttccgtgacttttatttttataagcattaatcaaatcctcatcaaacttatacttgtctcgaaaaatgctacggcggtatgcaaggaaagaaactaaagttgttaataataccccaatgaaactatatgtataatctggcatgacttaaagctcacttatattcaacgtgatatatttacaatatgcaatcattcaatatttaactatattgtgattgctataaatccttcggtgaccaataatttatagataagtcacaacacattttatattcctatcgtgacatgtcacaagcctcttgattttgtttttgtgccgtgtcacgattttaaaagagcaagccgcaacggtcagcgtaggattaactgataattgctcaaatcattacccaaataccccacaacaacactgcaagcctatagcgcaacaatccgcataactctattcactacccaatcaccctgaaaaccacaccaggcaaggcctcccctcacttttcgaaatgcataaaaagcgaatttttagtcatgcaaagcgggggcgagggggtgacgcggaaagagggcttgccgctgtactttcatatccgcaatgcccgcagaaatacccaccagaaagccagtgcttaccaccgccttctctgcatcaaaacgacacgatccgacggacaacaaaaaagtgcctgacagcgtgggctgtaggcgctctggtggctggctttcttgcggtcaatttatctcaccacatgtacgccattcatttttatgcatattcattcattttgatagccagctaactcccttcgtgctatcgtaaaagcatccgcgctacaggctggataacatcagatgtttatacccctttgtctgccaacattccgaatcgccctgcaagcaacacccgtctttctcgcccggtaaagtatccccgcagcgcttacaactacttttcttcagttcggccagttgcttgtgcaatagcttattgtcctggcgaatcaagccaatcagatattcggtaatgtcgtaaggctggcgagctatgcggcgctgctcgcatccctccagcagcatagccaactcctgcgcatccaaacgcagggtaacggtagttattcctaacgctttatcgcgcagacgctgtgcgcgtttgcggtcgcttgctgtagtcattttttctatcctttcacaacacgaaagccgactaagagcgaattatcatcataatccgcccctaccacgccaccctcaaccagcgcattaataacgccgatcatgccgactcgtatcaccccatctattttgccgcacatagccgtactgtcagtggcgaatcggttggagcaagccacacgaatagccgccaaggttgtaatagcatctggatcaagaattaataattcgttaagaatatcaacagctttatttgcattaatcattttcaatctccacgttataacaaataatcatcctggtgcactgccattaactccgacagaatagccaggcgttcggatgcaggtactcattaggtgttcaacaccaatggatttatctatatcggataactaaccatcacccagccaccggcccaaaccacaccggtttatcttggttatcttctgcctctacggtttccaacttacgtttatgctcaccaaccaagcggataaccagcggcacctgttgctcgcgtagccgctcaaatctggctttaatatccgtcgccgaagtcgtcaaattgcgaacgacatacagtgcgccgtccgttctcgcccgataagtcgtaccttcaaccgtaaccgatgctccttttgctatggatttcagcatgttgttatccagagcaataccgatggaatcagcgaaatctttgattaaaaactctttctcgcccagatctgcggccagcatcaattcgccctggctcggctggcggggtttagtgggctttttccgaggttttgcggcttcgcagcgtatccgattaagcatttgccgccgctctttagccgttaatgcatcaaaatcgatgttttcaggcggtggcggcggctcaatgaccaccggtggtgtggtcattttttgtacccccgtacagttattgacagaactccgagagggcgcgggcgcgcccttaacgtcaacagccaaatcaacggcgcgggcggagacaatcgtccagacagttgtacgcgtgatgatgggggtgtctctgccaacgatgggcgaaaacaatcccttgatgcggatcacattttcaaaatagccgttagtcgcttcggtgacttcgtaataggtacgcacaatcaaatcatcgcggcgaacgaatggcccaccttgggcattaacatacccggcccaattaccgttatcagccgcatcatgggcggcggcaaactcaacgctcaaccccacagcctgatcgtgatcggccattcggcgtaattcgcggtaaaccgtcaccggcgcaccaccgataaattgaaactggcggatacgccaacgacttgcccaggcagataccgccggagcaacttcttttagcaacttgccggtatcgtcatcgatttcaccgtccagcgcgtagccgtcgatattcttcgaaatatatttcgcgatataaccggtcgcgctacccttctctggatcgatagcttcggcatgaaaacgggcctttcgggttttttcgctattcagctcgtcgatattttcctcatgagcatgattgcggaaaatcacccgagcctgttcgatatgctccgggcgcataaacagcaacatatgccagtgcggtgtgccatcgtgatgaggttcagccacgcgaataccaaacacgcgaatatcttcccgatgcaattttgcccttacccggctccataccccgcgcaaataacgttgggttctggctgggcttgcaccattccacttacggttacggtgaccgtccttattggtggcatgaaatttagaaggtgcagtcagagtgtaaaattcccctgcgtagcccaactcttcacaaatattttcaaatccgcgaatacgaaccattagctcacagcggcgaattgccgggttagccacactgtgatcgtatttctcgatcagggaaaaacgattcccttgctcgtcctccagttccattgatttaagaaactctcgggtacgccgcttctgctcccgccaatccccaacggtggcagtactggcataaggcgtggtttttttactgacattgccgagggcaatatgtaaatgctctttccacatatctgcatggcggcgcaatcggcgcttccaccaatcctcggatatcatgcgagccacaaatgaagtcaggttttttacgttcagtttccagcgcgccgttagatagatttcccaaccgggaggcgtctgcttaaaagcctgagtcattgctgcggcacgacgataaagggcaaaaaccaccgtaaaatcagacttgccgtcaacttcatcatttatcacgcctaactcacggcgtaattgcagagaaatatctttcgccagcaaatcaatatccgcccgaccggcatccggtagatggctaaaacgggtagcaagtggggctgtgtcgttagcttcggcagatatttgatattgatcacgaaccagatccagacgtggcaatacgcgctcaacaaagtttttcgttaagtgcgtattggctcggcggatgccctggttttgctccagtttattgaggtgcaaacggatgccgcgctgaacaatatgcggctgtttagcaaggagatcttgggcatgaattaatgccgcccgttgttggtctgtctgctcctggttttggggctgtaaataaaccggcccaccaattgcagggcgcggagcattccagggataggcccactcaaatggcactacgccgctacatggaaaaggtaacggcggtgtaggtgcaatgcggccgcgtgagtctcggctcaatccacggcctccagcgtagcaataatctcctgcactttctgacggccatcgcctttgcaactgatagagcgcggcgcggtaatactgtggacggcgaaaagagcgtaaagctcggcagcgcggggagtgtcgctattggaaaccaccaccttgcaaccgttatcagcggtatttaccagcgccaaagctaggcggcgctgatcgtcatcggtaaaaccatcagtgtgatagtgggtaaaatcggccgttttagacgttgggatatacggtggatcgcaataaaccacatcgcctgggactgtcatatttagcgtctcggaaaagtcgcagcataggaacgtggcgttcttggccttttctgcaaagaaacggatctcagcttcggggaagtaaggcgctttatatttaccgtaaggaacattaaaaccgccgctttggttatagcggcacataccattaaaacaatggcgattgagatacagaaatattaccgctctgctgagtgcgtcactgttgccggtattaaaaacattgcggaattcataatattgctcggcggtgttagccgtcataaacaaggacgaggccaggttgattagctcgctcggttctcgtttggcgatgttgtaaaagttaatcaggtcagcattaatatccgttatcaaatattcgtcataatccgtattcagcatgaccgaacaggaaccggcgaacggctcaaccagccgcttaccagcaggtaaatgctggcgcagggtttccataatacgggccttggaaccggcccatttaagcggggagcgatttaattgcattgagcaccgcccgccatagcacgaataatacccaacgtggttttacagtcggaaagcgcacgatgagcagtaccctcaataacaacgccttgctgtttggcggcgttacccagtctctgccatttgtatttatttctcttcttatccctttcgccgaaatattcggcataagcttccatgacgcattcagcttcaagaatatatttcttacctaaaaactgacaattattagctgccgccgtttgaaaaattaaacgggtgtcaaatagcgcattataaataagtagggtacggtcattggtcagcaccataaattgccaatgaatatcacgccatgtcggggcggctgcaaccatttcattcgtgatcccatgaatggcggtggcctcggcggggatagtttttattggcttaacaagcgtatccagcaggatcttaccggtacaatcaataatagttatttctactatttcagcatcatcccctagccctgtagtctctgtatctagaataagacagttattttttagccactttttggctcgatgctgtgcgcctaatttacacagtctattacccagccccttaatccattgacggatggcgcggaaaagtgctttaaatgaatcgcgagcacccatgattttttgaactgatttaatgtcatttttcattatttatttccactcaagatagctgcattggcgttacaagaagagaggttgtcaggaagagcaaaagacagcattaccaacccctgaattgcaaaatcagcttcggtaatatcggtggtcaacaccttaatttcacgccctgtaaattcatccgctccgccatcccattcctttaacagcaaataatcaccaacacggaaaccccggtcatctattcgtagttccgcttttttctttccttcgataactgcatggaaatattcgggcaatattttcaattcatgcgttcttggcgcgtaggtatatgcggtcaccgcctcctgaaatgccgttgcagtgcgtattgcttctttgcgtccagactctgttttatttattgctttaagcgcgttagcggttgtgccgaataaaccagcggtaacgatgtttttacctgcatcagtacccgcaatcgcaaaaatcaatgaatcccatagcggttcaaatgctgaatggaaatactccaaatacccaacgcgctgatttaactgctttatcttctgttgctgactgctttcaatacagctaaggcgctctatttctgatgcggcagaggttaagtggcctatagcgtgttttgccatagcagataacaacggatgcaactcatgaggaaatgattgaattgcattgattacgcaggtaattcctttaattgaatcgatggttttggtattagtcataatttcagcctcgtttttaggtaataaaaagcccgacgcaataaagcgcctgtaaatttcaggtgttaatcaggttcgatttaaatcaggtaataggatcgcaatctatataagtgattctttccggtaataaactggctgacgctcgccagcggtttaaggcatcgacaatatttctttgttcgtctggtcgtaaatctgaaaatttattgttatgtctggctctctctatgcctgccagataataaatagcacctttcatcttcgggtctgtctcacccatttcagtaataagcgcgggaataagccctttatgttttggattagggaataagcaccaaatttcagcagtatgtttaaggccgttctgacgttcttctaatgtcagcggtaaagcccgtacctgttcggtgttagccataaccaatccttacgtgaaaatacccattaaacgagcaaaccaacggcgctttgctccgggcttggcaataaatggtgtgcggcaacctttaacgaactgcatttcgctggctttgggttgtgacttcgatgggttttggtataacaccgcaattacactgagtgaccagcaattccaacgcctgagcgctagtttggtctccagatgattgtgcggtacttaacagcccctccaagccgacactcaggcgaaaggcgtaatcattaagcgaaaacattcgcacctcgtcggcaacagcggaagcgatacgcaggttttcggccttgaagtggtattgctgcaacaactcattgatcaatatgaaataggcttgcttcatttcttatcctttaaagttgctggtacgttttgcgttcggtttcttttttgttgattatgcggctacggtgatcgtgaataaccgcacgggctgaaagaaaggcaatccaaacgagtgctgccaataaggctattgctccgctggttaattcggctaattggccgggcatgtctcgacctcatcgttaaatggttgcggggcaatgccggacgttttgaattcttgcagggccgcactgagctgatgaaaagcgtttaattcagagccgcataactgccaggctatcgttgtgatcatggttaatcctgcaatggcattacaggtgataacttctttttcacgtgcacgaagatgaggattaaacgagaaagcttcgcctttatctgatgcacagagatttaactcagctatttcagccgtgtaggttcgtaatatggcgttagccaccggtaagcaaatggatttcatgctgcggctcccgttgtgcgttggctatacaaccagtcaatgtattgagtcgccagagattgtgagtagaaatagccaaacgactgatcgcccaacagcacctcatgccgcgcaattgggttaattgccgtactgcggcgataagcgagcacaaacgagcgataaccttttgagtttttgctgattgggattatggcgtagctcatattggctctcccagccctaaccacatcaaccacccgtcacgaatttctttaggacggctatcaaaagctaacttcattcccttgttccaggctggcaaataaacccatgattcggcgcgtgctgcagggttctctgggtttttcatttccacgacgggcaacttacctttctcaatcatacccttcaccgcttccggtgatttgccgatcaatcgagcaaattccgggtaactaatggcatctgacatgcttacgatttctttgctcatctgctaacctctacgattgtgcaattaattgcttatagttgcttttagttgcctatggtggcgacaagtacgccttacgatagtgccaatattatacgatggtataaacatgtcaatagacgtatcagagaaagtaaagctaattagagagtcagaaaggataaacagaaaagaattcagtgagttaactggtgttaactatgcgactttgtctagctatgaaaatggtgctaagggaatgagcttagaaatgacaatgaggatcttgaatcatccccgatttaaaaaatacacactctggtttatgaccgatcagattgcccctgaatccgggcaaattgcaccggctctcgcacactatgggcgagacagcgaaacctctccgcaatcggaaaatggggctggctaactctttataagatattcattttcgaagataaatttcaaaacgactactacatcggggagttttcttatgtcgattaagaagctcgatgatggtcaatatattgtggacattaggccggctggtcgcgacggaaagcggattaggcggacattcagtaaaaagcacgaagcactggcgtttgagaaatatgtggttgttaattaccacgaaaaggattggctatctaaacctgcagataagcggcctctttcagaactgactgcattgtggtggctatatcatggtcagagcatggattatgggaagaaatataaagcccagttggcaaaggtcgccaagattatggccgatccctgcgcttttcagattgataaaagcgccattgccaaataccgagcgataagacttgcggagggcgtaaaggcatccagcgttaacagagatttgattgttttgggaggaatgtttactgcgctgattaatgcggggatgtatcacggcgaacatcctttgagagggatcggtaaattaaaagccaagcaaacagcaatggccttcctatcgcagggggaaattgcgttattgctcgaccgactgaatgaagataatcgtcggattgctgttttatgtctgagtactggggcgcgctggggagaggctacgcgcttgagggcggagcatgtagtaaataatcgagtgacgtttgttgagacgaaaaatggcaaatcacgctctgttcctatatcgcaggacgtagctgacaatctgatttcaaaaaaatcaggcttgctgttcggcgaagcggcatacccgatcttttgccaagaactccggtcagtgaaggtagacttgccgcacggccaggcaacgcatgttttacgtcatacctttgcgacacattttatgatgaatggcgggaacattattacgctacagcgaatattaggtcactcgacaattcagcagacaatggcatatgcgcatttttcacccgactacttgcaggatgctatttcgttcaatccattaagaggaaaagcaacgatttagtgtccacggattgtccacacttgggtcgcttttagatgcttttagaggcttgtagtgctggctaaatgattgattccccgtaccacaccagtgggacggggatatcataaggctcctacaggagcctttaagcaaatacaaacggaacgctattacagtacgtcgaccgcgttcagttctttgaatgccagttccagacgagtaatcattgaagtctgggcagcacggagccatacgcgtggatcgtagtatttcttgttaggtttgtctgcgccttctgggttacccagctgagcttgcagatagccttcgttctttttgtaatactgcaggataccgtcccatgttgcccactgggtatcggtatcgatgttcattttcactacgccgtagctgaccgcttctttgatttcttctgcagtagaacctgaaccgccgtggaatacgaagtccaggctgttgtgtggcaggccatgttttttagaaacataatcctgagaatcacgcagaatagttggggtcagtttaacgttgcctggcttgtaaacaccgtgaacgttgccgaaagaggcagcgatggtgaagcgtgggctgattgcgttcagtttttcgtaagcgtaatcaacgtcttctggctgagtgtacagagcagaagcatccatgtgactgttgtccacaccgtcttcttcaccgccggtacaacccagttcgatttccagagtcataccgattttcgccatgcgagtcaggtatttgctacagatttcgatgttttcttccagagactcttcagacaggtcgatcatatgagaagagaacagtggtttgccggtagccgcgaagtgtttctcacccgcgtccaataggccgtctaaccatggcagcaatttcttggcacagtggtcggtatgcagaatcacaggaacgccgtaatgctcagccatctgatgtacatggtgtgcaccagagattgcgcccagaattgcagcaccttgtggaacatcagttttcacgcctttacccgcgatgaacgcagcgccgccgttagagaactgaacgataactggtgcacgcactttcgccgctgtttccagcacggcgttaatggagtcagtacccacgcagtttactgctggcagagcaaagttgttttctttagctactgcgaacactttctgcacgtcatcacctgtgatgacacctggttttacgaaatcaaaaattttagacatgttacgttgtcctgtttcgtcggccgaagataaatggaatcggtttcgctgattaacctgtcggcggctaccgacagcagcgaaatagcgaaacgggcggctttcgccccccgtcatctaaattactgcttagcgcgctcttccagcatcactactgctggcagttttttgccctccacgaattcgaggaatgcaccaccgccggtagagatgtaagagatttggtcagcaataccgaacagatcgattgctgccagagtgtcgccaccgccagcgatagagaatgcttcgctctcagcgatggcgcgagccacgatctcggttcctttacggaagttagggaactcgaacacgccaaccggaccattccacagaatggttttggcgtttttcagaatctcggccagacgttcagcggacacgtcgcccagatccaggatttgttcatcgtctttgatttcagttgctggtttcagcgtcgcggtcgcagtttcagagaactcggtcgctacgcgtacatcggtaggaaccgggatattgcaggtttccaacagacgtttggcttctgggatcaaatcagcttcgtacagggatttacctacgttgttgccttgagcagccacgaaggtgttcgcgataccgccacccacaatcagctggtcagcaattttagacagcgcgcccaatacagtcagtttggtagaaactttagaaccgccaacgatagccaccatcggacgagctgggttacccagcgctttacccagtgcttccagttcagctgacagcagcggaccggcacaggcgataggcgcaaatttaccaacgccgtgagtagaagcctgtgcacggtgagcggtgccgaaggcatccatcacgtaaacgtcacacagggcggcgtattttttagacagggtttcgtcgtctttcttctcgcctttgttaaagcgaacgttttccagaaccaccagctcaccggcagccacttcaacgccatccaggtaatctttagccaaacgtaccggagaagacaatttgtctttcaggtagttaactaccggcaacagagagaactcttcgttgtactcgccttcggtcggacgacccaggtgagaggtaaccattactttagcgccttgcttcagcgccgcttcgatagtcggcagggatgcacggatacgcgcatcggaagtcactttgccatcttttaccggaacattgagatccgcacggatcagcacgcgtttgccagctagatccagatcggtcatcttaattacagacatggtgaatcctctcgttgattctctttaaagttgcttatcagtaggtcaactcagggtaatcccttgaattaacccgccgtattagaaaccgctgtcggccattgccaatgtcgtatccaacattctattggcaaagccccattcgttatcgcaccacaccagagtcttaatcaggtgctgcccactgacccgtgtttgggtgccatcaacgatagcactgtgcggatcgtggttaaaatcggtcgacaccaatggtaattccgtatagtcaactataccacgaaatgaacccattgccgccttttgcaaaagctggttgacctcagtcaccttcaccgaactgctcacactgacgctcagatcgatcgccgttacgttgatcgtcggcactcgcaccgatatcgcttcaaacctgtcgcagaacttcggaaaaatacgggtaatgcccgcagccagcttggtatcaaccggaataatcgattgactggcggctcgggtgcgccgtaaatcctgatgataggcatcaataaccggctgatcgttcatcgaagaatggatggtagtgacagtgccggattcgatgccgtaagcctcgtccaacagtttaataacgggaatgatacagttggtagtgcaagacgcgttggaaacaatccgatgctctgcgcgcagatcctgatggtttacaccatagaccacggtggcatccaaatcatggctacccggatgagcaaacagtacctttttggcaccagaggccaaatgcgcctcgccatcttctcgggaaccgtacacgccgctgcaatccaaaactacatcgactcccagctcatgccaaggtaactgcgctatttctggctgatgtaccagccggataacatcgtccccaacgtagagcttgtcacattcctgacgaacatcccaagcgaaacggccatggctggaatcatatttaagcagatgagccatgccttccgcgtttgccagttcattaatggcaaccactgaaatttctgcccgacggcccgactcatacagcgcacgcaatacactacgaccaatacgcccaaagccatttatcgctatgcggattgtcatgttactccctgttttatggttatcttcatgcaaccccatagagtactgtagcacgtggcctgatattcatcgttttatcacatttcagataatcatgctgtcggcattatgcaaattattcccgacaggccttgataatgaatcacaactgaaacgcttcagccagaataaaccaaacgaggtacaaagggaatatcttgctgataaagggcacatatccccccttttctggcgaaaaacaggcaaaaaaaaggccgcagaagcgaccttttaacatcgatattaccgagggataccttcccttttacaccttgagaacagcgtctgttatttcaacagcgcctgagctttcgctactacgttctcaacggtgaagccgaactctttaaacagcagatctgctggagcagattccccgaagctggtcataccaacgacagcgccgttcaggccgacgtatttgtaccagtaatccgcaataccggcttctaccgcaacgcgagcgctaaccgccgctggcaggacagattcacggtaagccgcgtcttgcttatcaaacgcatcggtagatggcatagaaacaacgcgaactttacggcctgcggcagtcagttgatccgctgcggcaaccgccagttcaacttcagaaccggtcgcgatgaagataagttcaggctgaccagcgcagtctttcaggatataaccacctttggcgatgttagccaactgtgctgcatcacgcggctgctgagccaggttttgacgggagaagatcagtgcgcttgggccgtctttacgctccagagcgtactgccaggctaccgctgactcgacctgatcgcatggacgccatgtgctcatgtttggcgttacgcgcaggcttgccatttgctcaaccggctgatgggtcgggccgtcttcacccagaccgatagagtcatgggtataaacgaagatgctgcggattttcatcagagcagccatgcgcactgcgttacgtgcgtattccacgaacatcaggaaagttgcgccgtaagggataaagccgccgtgcagagcaataccgttcatgatggcggacataccgaattcgcgcacaccgtaatggatgtagttaccggcgatatcatcgttcagagccttagagccagaccacatggtcaagttacttggtgccaggtcagcagagccgcccaggaactcaggtaacactttaccgaaagcttcaagcgcattttgtgatgctttacggctagcgatattggctgggtttgcctgcaattgctcgatgaatttcttggattcagtttcccagttagctggcagctcaccgcttacgcgacgtttgaactcggcagccagttctgggtaggctttctcataggccgcaaacttctcgttccaggcagcctctttcgctttgcccgcctctttagcatcccaggccgcgtagatatcttgtggaatttcaaaggcagggtatttccagcccagcgcgtcacgagttgcagccacttccgcagcgcccaaaggcgcgccgtgggaatcatgggtgcccgctttgtttggtgaaccgaaaccgataacggttttgcacatcaacaatgaaggcttatcggtaactttacgtgcttcttcgattgccgctttgatggagtcagggttatgaccgtctacatgacgaaccacatgccagccgtaagcttcgaaacgcgctgcggtatcatcggtgaaccagccttcaacatgaccatcaatggagatgccgttgtcatcgtagaatgcagtcagtttgcccaatttcatggtgccggccagagagcacacttcgtgagaaatgccttccatcatgcagccgtcacccataaaggcgtaggtgtggtggtcaacaatatcgtgacctgggcggttgaactgcgcgcctagagtacgttcggcaatggcaaaaccaacggcgttagcaataccctgacccagagggccggtcgtggtttctacaccttcggtgtagccatattccgggtggcccggagttttagaatgtaactgacggaagtttttcagctcttccatcggcaagtcgtaaccggtgaggtgcaacaagctgtagatcaacatggagccgtggccgttagacagcacaaagcggtcgcggtcagcccagtgtgggttagttggattatggttcaggtaatcacgccacaggacttcggcaatatctgccatacccataggggctccggggtggccggaattcgctttctgcacggcgtccatgctaagggcgcggatcgcgttggcaagctctttacgagaggtcatgttttactccaggtcggatttaaaaagcgttcaagtctatcattttctcagactagacattgaaacggcaatcactaaaaacaaatgaaggcaacttccatgacggcacagccgaatttgctggattttcagaataaagctatagctctatcgctgattgcacgttaccttcgctaccttcaggtagctatatcaagcgtcagtattgcgagctagggtagtggaagccgcactgatgcaacagctattaatgcaattgctgtaatgtagcaatgaacccagattaattgaactgtctaactatattgattgaaacgtaaaactatattgattgaaactgaattgattagaacggattaaaccttaaaaattattgaacggcaaaaccatgctgaacagcataataatgcataactacaggaaataaggcgttatgaacattcgtacttcgttgatggctttgagtatcaccgcgctgctaagtgggtgtcagaatatgaacaccgaaggcctgatgcaatctggcgcacaggcgtttcaggctgcaacgctaagtgataccgatgtcagaacgctcagcgataaatcctgtgcagaaatggatcaaaaggcgcaaatcgcgccagctgacagcgaatacagcaagcgtctggcaaaaatttccgcagccctcggcgacaatatcaatggaacaccagccaactataaggtttatgtgaccaaagacgtcaatgcctgggcgatggcgaacggttgtattcgcgtatacagcggcctgatggatatgatgactgacaacgaagtggaaggggttttgggccacgaaatgggccacgtcgctttagggcatacccgtaaagccatgcaggttgcttatggcaccatcgccctgcgtaccgcagcgtcttccgctggcggtattgccacttccctgtctcagtcccaacttgcggatattggagaaaaactggtgaacgcccagttctcgcagaaacaagaaagtgaagccgatgattattcctttgaactgctgaaaaaacgcggtatcgatccgaacggtttggtcaccagtttcgaaaaactggcaaaaatggaaggtgggcgaggcagcagcctgtttgacgatcacccggcttctcaggcacgcgccgatcatattcgtgagcgtattaccagcggccagtaagctaattggtatcaatcatttctactacgcccgtaaatcgcgggcgttttttcttctttcaattttcatcgactggtttatatcaactaacttttatcgattaattttcatcgatttccacctgaatctgcccaccgtcaatccgcaccggataagtttgtagatcgcgatctcccggctcacgtagacatttcccgcttctcacgtcaaacaccgccccgtgtaacaggcactcaatagtgccctcatcaaaaaatcccggactgagtaacgcatttgcgtgagggcaaatatcatccatcgcaaaatattcgccatcaataatataaatcccaattcgtttatcccccacgctggcggagaacggcgaatctggtttgacgtaagacactttgcacacattcagccagctcatgttatcgctccatttattctcaggaagcccatttcaaggggtacagttcggcttatcgatcttagtgtggtcgattttgcgcataacggaggaaaatggttgttcgcagcagagaatagatatggaggggaaacaataagggcagaccgaagtctgcccttaagataatgcctgacaagccagttaactgggactcaccttcaagaattactcgtcttcgagataagtgtagccatacagaccggattcaaactcttccaggaactgggcttgcagttctggggccaaatcggtttctttgacctgatcgcggaagtgattcagcagtttttccgggtctagctgcacgtaagccagcatatctgccacggtgtcgccttcgtcggtttgttccacgttcacggtgccatcaggataaacatagacatcaactgcggccgtatcaccgaacaggttgtgcatgttgcccagaatttcctgataagcgcccaccataaagaagcccagcgctggcgggttttccggatcgtacggaggcattggcaacgtggtagccacaccgtcgccgtccacgtaatgatcgatagtaccgtctgaatcacaggtgatatccagcaacaccgcacgacgctccggtggcttatccaaaccttctagcggcagaaccgggaacagttgatcaataccccaggcgtctggcatcgactggaacagcgagaagttgacgtacagtttgtccgccatacgttcttgcagctcgtcgataatcggacggtgtgcgcgattgctcggatccaactgttcctgaatcatattgcagatagtcaggtactgttgttcagcccaggcgcgctgcgtcagatccagcatgccgtgcgcgtattgggtatgcacatcgtgcaaatccatctggctatcgtgcagccattcacgcagagaacgacggctttctggtttctgcatttcctgccaagtatcccacaggctttccagtgcgcgtggcgcatcttcggccggtgcctgaggttcactgaattcattgcgttccacgccgataacgttggaaaccagcacggtatgatgcgcggtaaccgcacgaccagactcagtaatcaccgttggatgcggcaaaccgtgttcattacaggcatcgccgataccccaaatcacgttgttggcgtattcgttcaaaccgtagttcacagagcaatcggactgagaacgcgttccttcgtaatccacgcccaaaccgccgcccacatcgaagcactggatgtttacgcccagcttatgcagttcgacgtagaagcgagcagattcacgcacgccggttgagatatcgcggatattggaaagctgcgaccccaaatggaagtgcaacagttgcaggctatccagactgttagcttcacgcagcatttctaccagttgcagaacctgagttgcggataaaccgaatttggatttctcaccgccgctggcctgccatttacctgacccctgagacgccagacgagcgcgaacacctaggcgcggcaccacgtccagacgtgctgcttcttccagtaccattttgatttctgacatcttttcgatgaccagatacactttatggcccagtttttcgccggtcagtgccagacggatatattcacggtctttgtaaccattacagacaatcacggagcgagtcatgccagcgtgagccagtaccgccatcatttctgctttggagccggcttccagacccaaaggttcaccggaattcaccagcgattctatcacccggcggtgctggttaaccttaatcgggtaaaccaggaagtagttgccttgatagccaaattcgttacgcgcacgctcaaacgctgcgttaatggaacgcaggcggtgctgtaaaatctgtgggaaacagaacaaagccggtaaacgctgcccgcgctgttcttgcatatccttgaccagttgcgccagatcgacacgtgcctgggggacgtccggatcagggcaaacgctgatatggcctaattcattgacgtcaaagtagttcccgccccagtaggcgacgttataagtgcgcagcatcttgctggcattacgatcattcatggcaacctcctgcatggagcgtaaagaaacatgtgcgcccgcagtagacggacggccaatcaagttatcatcagacataattcgcctctattgcgatactgacgataaagtcagtcactatcgcagctacaacctgcaaggacaacccgtgtgcgcaccctttaggaggaataatacgctaataaagcgccgcacgaccgcgagttatcactcagataattgtaaaacacgtttaaatgtaaaatacgtttaacgacacatacgtattgagatttcgtgaatcggatgcagcccaaatctgaaaaacagacggctggcgaaccggattcagtacttcaggcgaccgttaacctgcccgcgaatcctgagtggcacccatatgggtgtaacatcgggttgatggtatacaagaaaggaaggttgcaaggggggattgaacgtcagaacgacgcagctgttgatgtgcagcaaccagtagacaacggatcattaatccaaccacctccacgcatgtcgttcacgattgaacgaacaagacttattaataaacaagataaagtaacagtttgatgacgccgctgataatgccaatgtcgctgacaggattttcaccgccaactctcgccattaaacaatgagccaatgccattctatgccatcttcatcattgcgtatcaaataagctgcgcgcgcagtttatacctagaacagagagaaaatgcaaaatgaaaatggccgaacaactgtttcaataggtaaaaaatttgccgccaaagctcactaagcgttatctgatgttaaaaagggctggtaatgaagctgaaaggtgacctaaaatagacgtccagatgttaatccgtccatactacaaatatggaataggattataggccgctacaggctctgtttttttaatgactgcttgaggctttgcctaaggggggcgttacaggacgccagagtcaggaagcgagcgtattgatatgcaccaccgactcgcccctcaatgctatgcagtgatttttcatccgaataccaaggtaaagaataaaatggctaaacaccttttcacatcagaatccgtctccgaaggacatcctgataaaattgccgaccagatttccgacgccgtacttgacgcaattctggagcaagatcctaaggcgcgagtcgcctgtgagacctatgtcaaaaccggcatggtcatggttggtggtgaaatcaccaccagcgcatgggtagatattgaagaaattacgcgtaataccatccgtgagattggttacgttaattccgaaatgggttttgatgcgaattcttgtgccgttctgagcgctatcggtaagcaatcccctgatatcaatcagggcgttgaccgtgccgatccgttggagcaaggcgctggcgatcagggcctgatgtttggctacgccagtaacgaaaccgatgtactgatgccagcacctattacttacgcgcaccgtttggttcagcgtcagtctgaagtgcgtaaaaacggtacgctgccttggctgcgtccagatgcaaaaagccaggtgactttccaatacgaagacaacaaaattgtcggaattgatgcggttgtcctgtctactcagcattctgaagacatcgcgcaaaaagacctgcaagaagcggttatggaagaaatcatcaagccggttctccctgctgaatggctttctgcgaataccaaattcttcatcaacccaaccggccgttttgtcatcggtggcccaatgggcgactgcggtctgaccggtcgtaaaattatcgttgatacttacggcggcatggctcgtcacggtggcggtgcattctctggtaaagatccgtccaaagttgaccgttcagcggcatacgctgcgcgttatgtagcgaaaaacatcgttgctgccggcctggccgatcgctgcgaaattcaggtttcttacgctatcggcgtagcagaaccgacttccatcatggtggaaacctttggtacagagaaagtggctccagagcaactgactctgctggttcgcgagttcttcgacctgcgtccatacggcctgattaagatgctggatctgctgaaaccaatctaccgtgaaaccgcatcctatggtcactttggccgtgagcacttcccttgggaagcgaccgacaaagccgaactgctgcgtgatgcggctggcctgaaataagtttcagacctttcgcgcatcaagttaaaaccccggtttccggggttttttatgcctgacgatgggctctgactcgttcagtcaggctaaaaatcatcattcccaccaccatcgccaatgcgaagatcatgccctttcccacaccggcaccgactaataccagcgcagggccagggcaaatacccgctaatccccaaccaaccccaaatagcaggctgccaccaatcaagcgccgatcgatttgcgttgccgtcggcaactgcatcgggagccccaacagacttacagagcgcttacgagtcaggaaaaaggctaatgtgcctaccagaatggctccggccatcaccagccctaaagacggatcccacaggccgctaatatcgagaaaaccaagcactttagccggatttgccatacctgcgacaatcagtcccagcccaaaaatcagtccggccaatagagaaaagaactgtttcattttcctgccttatctataccaatacgtggcgaattagccacaccgtgaaaaaaccgcccagcatgaaactcaaggtcgccgccagcgaacgcagggaaaaacgcgataagccacagacgccatggccgctggtgcagcccgaaccatagcgggtgccgataccaaccaataaccccgcggctaccagtgttccgatatcggcatcaatccgaatcgctggcaaaggtaaaaacaaggcataaactaacggggaagcaatcaggccaatcaggaacgccaatcgccaactgatatccccctttttccctgctaataagccgccaaaaataccactgatccccgtaatttttccgttgaatacccaaaataacgccacggagcagcctaatattattcctcccgccgcagccgaatacggtgtaaaattcatccaatcaatgttcatgaatcccctctccttcttttggacagtaaagctcatatagcgtgtgtaaaatcgccagaatccgtcgatctgcgatggagtaataaatacgtttcccttcccttcgcgtcgtcaccagcccttcgtttctcaaagccccaagctgctgggaaagggtcggttgatgaatattcagcaaggtttccagctcaccgacggatttttccccctgactgatttggcacagcaataacaaacggtcttcatttgccagcatacgcaaggtaccgcaggcttcagccgctcccatgctcatcagattcagactcaatgtgtctttgctactcatgttacgccctgcaatttcgccattcattatataaaaacatataatataattatataatgtgtaattcgtgcgctcaaggctgaacgggtcgcttgcatctgcgtttccgtcacactattcttccgctctatgagctcacaaagaattcctatcgccctgcaacaaggggttatgcagtgtctacgccagaagctgcaacttgccaaccagcatctgggaacccaacatccagagccaaaaatcaactattaccaacgcggtactagcgccggtagcgcttacctacaatcctgggaaattcgcctgaatccggtattactgttggaaaacaaacagacatttatcgacgaagtggtgcctcatgaactggctcacttactggtatttcgtcggtttggccgcgttgcgccacacggtaaagagtggcgctggatgatggaaagcgtgctgcaagtccccgccagccgcacgcataagtttgaaatcgcctcggtgcagagcaaaaccttcccctatcgctgtgcctgccaactgcaccaactgacggtgcgccgccacaatcgggtgctacgcggagagagtgaatatcgctgccgtcactgcggtgaaaaactgcaatatacgactacagaaacatcttagttattggattaactgtataaaaaaccagatctttgtttgcctgagccgataactttctataacctgcgttcttttccatatttaggtcgttttggaacatgttacgcaaaattctattggttctggtttgctcttccccgctattctcatccgtcagttatagccaaaatatcaacaacttctcgcatgccaaagccgcagctgccaagatccatcaagacgctcccggtagtttttactgtggctgccagattcagtggcaaggcaaaaaagggcttcccgatctaaacagctgcggctatcaggtacgaaaaaacgcacaacgggccgagcgtatcgagtgggaacatgtggttccggcctggcaatttgggcaccagcgtcaatgctggcaaaatggcggccgtaaaaactgcaataaagatgcagtctatcgtcaaattgaaaccgacctgcacaatttgcagccagccattggcgaagtgaatggagaccggaataacttcatgtacagtcaatggaaaggcggcgaaggtcaatatggtcaatgtgcgatgaaggttgatttcaagaataagcaggcagaaccaccggcgcgtgcgcgcggtgctattgcccgtacctacttctatatgcgcgatcaatatcagcttcgcctgtccagccagcagaccaggctgtttgaggtttgggatcgccaatatccggttgataattgggaatgcctgcgtgacgagcgtattgcaaaagtacagggcaatcataacccttatgtacaacaagcttgccagcggcaaaaaagctaacctactatattggctgatatccccattggccgatatccccgccactctgttattctgcgggcagccttttatttcgcgtcgttaaccaacgaacggcgcggtgaaattttcgttacggaaacaagagcaaatccatgcgtatacctcgcatttatcatcagcagccgctgtcggctcattctgaactggctctcagcgatgacgccgccaatcacgtaggccgcgtgttacgcatgagcgaagggcaaaacctgcagcttttcgacggtagcaatcagatattcagcgcggaaatcattcgcgtggataaaaaaagcgttcaggttcgcctcggcgacgccgtggttgaagatcgggaatcccccctgaatttgcatctcgggcaggttatttctcgcggcgaaaagatggagtttactatccagaaatccatcgaattgggtgtgaacgtcattacgcctctgttttcagagcgttgcggagtcaagctggacggcgagcgtttggctaagaaaattcaacaatggcaaaaaatcgcaatcgccgcctgcgaacagtgcggtcgcaacactctgccggaaatccgtgaagctatgcagttagaggcctggtgcgccgaacaggatgatagcctgaagctaaatctgcacccgcgagccagcaatagcattaatacgctgccgctgccggtggataaagtccgcctgttaatcggcccggaaggtggtttaaccgccgccgaaattgagatgacctcacaccacggatttactgatatcctgctggggccacgcgttttgcgtacagaaacgacagcgctcaccgcaatcactgccttacaagtgcgtttcggcgatctgggttaaaggagaaaataatgatcaagctcggcatcgtgatggaccctatctcatccatcaatatcaaaaaagacaccagttttgccatgctgatggaagcacagcgccgcggttacgaattgcattatatggagatgaacgacctttatctccacgctggtgaaggccgcgcccgcactcgcttgctgaacgtaaaagaagataaaaaccagtggttcagcttcggcagcgagcaagatctgacgttgcacgatctcgacgttatcctgatgcgtaaagatccgccgtttgataccgaatatatttacgccacttatattctggaacgcgctgagatcaaaggcacgctggtcgtcaataaaccgcaaagcctgcgtgactgtaacgaaaaactgtttaccgcctggttcccggagttaaccccggatacgctggttagccggagcaaagagcatatccgcacattccaccagaagcacggtgacattattttgaaaccgctggatggcatgggcggcgcgtctatcttccgcgtgaaacaggacgatcctaacctgtcggtgattatcgaaaccctgaccgagcacggcagtcgtttctgcatggcacaaaacttcctgccagctattaccgaaggcgacaaacgcattttggtcgtggacggcgaaccggtgccttactgtctggcgcgcattccggcacagggtgaaacccgtggcaatctggccgccggtggccgaggtgaagcccgcccactgagcgaaagcgactggaaaattgctcgtgcggttgctcctacgttgaaagaaaaggggctgatctttgttggtctggacatcattggcgatcgtttgactgaaattaacgtcaccagcccaacctgcgctcgcgagatcgaagccgcgttccctcaagtatccgttaccggtatgttgatggatgccatcgaaaaacgcctggctgataaaaaagcctgattctacttggggttgcggcttcaacggcagcaccccatcattttattactttcatccgcaaattgcggctgtttatcttttacttcagctagttacctataaaacataatgaatttacagcatcacttccttattgctatgccttcactacaggaccctcagtttaagcgctcggtggtatatatttgcgagcacaatgaagaaggtgccatgggtttggttatcaataaacctgtggaaaaattcactgtggaatccgtgctgaataaactaaaaatcaccccttctccgcgcgatcctgccatacggttggataagccggtgcttgccggcggccctttagctgacgatcgcggttttatcctgcattcaccgcagccaggctttggctccagcgtgcgcatttcgccggaaaccatgatcaccacatcaaaagacgtgctggcgacattaggtacgccggaacagccgaaaaatgtgctggtggctctgggttatgccggttggcaaaaaggccagttggagcaggaactgctggataattcctggttaaccatcgaggccgatctcgatatcattttccatacgcctattgccgaacgatggcagcaagcagccaataaactgggcatcaatattttcaatatcgcccctcaagcaggacacgcctgatggctaaccgcaccattctcgcctttgattttggcaccaaaagtatcggcgttgctatcggtcaggaaattaccggtacggctcgcgcactgacctctttcaaagcgcaggacggcacgccagactggcagaaagtcgagaaattgttgaaagaatggcagccagatctggtggtggtagggctgcctttaaatatggatggcaccgaacagcctttgaccgccagagcgcgcaaatttgccaatcggctgcatggccgttttggtgtacctattgctttacacgacgaacgactgagcacagtagaagccagagcctatctgttcgacagcggcggctatcgtgctttagacaaaggcagcgtagacgctgcctcggcggtgattattctggagagctggttcgagcaacagcccgagtaatatcttggcaagatcatatcataaatgccctgagccaaggcttggggtcgccagcccatactttccccgcaaaacagatagcacattgatttaaaatcactttaccatgataaacaccgctatctgcggcagaatgctgccaatttacccctattgagctaagcacgcggtacaatagggcttggcgaatagttttagctgacatagtatgctgccccgcgatgatatcggcggatgaaattgggcaacggcggccttgattactatgcttagcctctattgtctcgatgccggaaccgccaagttgcgcaacggccaacgccgccgtctctgtagagatttatttaactctgacagattgatggcgcagaatatcgctcatccttagagggtgttttttacatttattgaggttttctcatgacaaaagtgactgttgctgcaacacaaatggcctgttcttgggacctgccgaagaacatcgaaaatgccgagaaactggtgcgacaagctcacgccaaaggcgcgcagatcatcctgattcaggagcttttcgctgcaccttatttctgtattgatcaaagccctgagcactatgcgctggcccaagagctggacaatagcccgctaattcaacatttctccaagctggccgccgagctggaagtggtattgccactgagcttcttcgaacgcgccaacaacgcttactataactctctggtgatgatcgatgccgatggctcggtgctggatgtttatcgtaaaacccatattccaaacggcccggcctatcaggaaaaacaattctttattcccggcgacaccggttttaaagtctggcaaacccgttatgccaaagtcggcgtaggtatttgctgggatcaatggttcccggaaaccgctcgcagcctcgctctgcaaggcgcagaagtgatcttctatccaaccgcgattggttcagaaccggctttcccagaaatcgacagccagccacactggactcgcgtacagcaaggccacgccgcagccaacctggttccggttatcgcttccaaccgcatcggtaccgaagccagtcaatatatcgatggtctggaaatgactttctacggttcttctttcatcgccgaccaaaccggcgctttagtggctcaggctaacaaaaccgacgaaaccgtattagtacatgaatttgatttgcaggaaatcgctgcacaacgcgcttcatggggcctgttccgcgaccgtcgtcctgaaatgtatcaggcactggcgacttctgacggcaaaacccggagataatcatggcgttgcaaacaactcctcggcaggacggtttctatatgcctgccgaatgggcacctcaagacgcagtctggatgctatggccttaccgtcaggataactggcgcggtaaaggtattcctgcccaacaaacttttgccaaggttgctgaagctattgctcgcgccacgccggtatacatgggcgtaccggccaaatttatggagcaggcgaaagccactatgccagccaatatcacattggttgaaatggagtgtgacgacgcctggatgcgcgataccggcccaactatggttatcaatggtaaaggcgaacgtcgtggcgttgactggaaattcaacgcctggggcggattactgggcggtctgtacgccgattggcgacaggacgaaaaagtcgccgaacaggtgaaccagtttcataaaaacctcagctatgccgctccgttgattctggaaggcggttcaattcataccgatggcgaaggcacactgctaaccaccgcggaatgtttattgaatccaaaccgcaacccagacctgaaccaagaacaaatcgaagcattactgcgggaatatctgggtgtaacccactttatctggctgcaagacggcgtatataacgatgaaaccgacggtcacatcgacaatatgtgctgctttgtacgccccggcgaagtggcgttgcactggaccgacgaccagcaggatccgcagtacgcccgatccgtggccgcttacgaagtactatcgcaagcggtggatgccaaaggccgtaagctgaaagtctggaagcttcctgcgcccggcccgctgtacaacaccgaagaagagactgccgacgtgctgtcaaccgatgcggtgcctcgtactgccggtgaacgtctggcaggttcttacgtcaactatctgatcagcaaccagcaaaccattttcccaatgctggatagccgtaccgatgatttggccaaagatctgttgcaacaaatgtatcctgactacgccattattggcgttccagccagagagattttgttgggcggcggcaatatccactgcattacccagcagattcctaagccttaatctgtacgtcatcagcccggaacttatatccgggctgatattccccgcatacccccgttgattctcctgacaaattccccgctcccaagagtctccattgctggacgtccctcttcgttgcttatgttttctctttccctctttcttttcttttgccttttgccttttgccttttgccttttgccttttgccttttgccttttaatgctgcgtccaacgttgttcttcggccagagccaatacgccctgattttgacgctgtactaaaccttgctcaaaagtttgcattcccatcgctccaccggtttgcatcaaactggttagctgatgagtttttccttcccggatcagatggctgactgcaccggtttgtaccatggtttcaaatatagccactcgccctccacctcgttttggcaacagcttttgcgcaattacggccatcaggctccccgccagctgactgcgtacactgcccttgtcttccgccggaaatgcgtcaaccagtcgatcaacagcctgcgccgccgtgcgggtatgcaaggttcctaacactaagtgtccggtttctgctgcggtcagcgccagcgtaatgctttctctgtccctcaattcccccagcaaaatgatatccggatcctgccttagcgctgccttaagccccgcactaaaagacggcatgtgctcgcctagttctcgctgctgaatcaagcatccctgactgtgatgaataaattcgataggatcttccagcgtaatgatgtgtcgccctcccatacggttaatcccgtcgagcattcctgccagcgtggtggatttcccactgccagtcgctccggttatcaatatcaaaccgctttcacagggtaataaatgatgcacgacctccggtgcatccaactcggccaaagtgggacattgggcggaaatcaaacggaaagcggcggaaagcccacgttgctgttgaaagaaatgcccacgcagccgcgttccacaagataatgaaaatgaaaaatcaatctgcccatgccgttgtaatttctcataatgcacctcatctaacagttgtcggcttaaattctgtatccatgtcgatgtaacctgcgcgacctgcctgaatatatgcaagtcaccgcaaattcgtaacgcgggatgatagccagtacacaggtgcagatcggaggcattatgctttacactagccgccacccattcattgaaatccatatcaaactcccggggtcatatgagcactatccaacagaacctacaggatgtcaggaaccggatcgccgctgctgcaaggaattgcgaacgctccccagaagaaattacgctgcttgcagtcagtaaaaccaaacctgtggccgcgatcgaagaagccattgccgccgggcaacacgcctttggtgaaaactacgttcaggaaggggtggataaaatccactatttcgccgggaatcccgagttggaatggcactttattggcccgctgcaatccaataaaagccgtctggtagcggaaaattttgcctggtgccataccgttgacaggctcaaaattgccaagcgcctgagtgaacaacgcccggcggacatgcctgcactgaatgttctgattcaggtcaatatcagcgatgagcaaagcaaatccggcattcagctcgccgaactccctgagttggccgccagtatttatggtttaccaaacttgaaattacggggtttgatggcaattccagcgccagaaagcgattttgaacgtcagcttgccgtttttcagcagatgaatcaggctttcttaaccttaaaacagcgctaccctgaaatagatacgctttctatgggtatgaccgacgatatggctgccgccatcagcgctggtagcaacttggtgcgcatcggcactgccatttttggcgctcgcgactatggttccaccgcgccagcgcaggcttaatcgaggatatttatgcaacatcgcaaaattacatttatcggcgcgggcaatatggcgcgcgcaattatcgcgggtctggttgcaggcgggtatccggctaaattaatcagcgtctgcgctccttcagccacccatcgtgatgctctggcgcaggaatttggcgtaatcagtagcagtgataacgtggctcagactcgtgaagccgaagtagtggtactttcggtgaaaccgcaaatgatggccgatgtctgcaagccattgagtgagcaggtagatttcggtaagaaactggtattatccatcgcggccggcatcagcgtttcgcgtttttacgctttgctgggagacaagctgaatctggtgcgaattatgcctaatacgccctctctggtaggaaaaggcatgagcgggctttatgcgccggagcaggttaaccaggccgatcgcgattttacctctcaattaatgggttcagtcggtaaagtgtgttgggtcaacgatgaaagcggcattaatcaggttattgccgccgcaggcagtgcgccagcctatttcttcttgtttatggaagcaatgcagcaagaagcggaacgtttagggtttgatagcgaaaccgcacgcctgctggtacagcaagcggcttctggcgctacagcgctagtcgaggccaacccgcagctaccgctatcgactttgcgcgagcaggtcacttcgaaaggtggcaccacggcggaagcgctgcgcgtatttaatgagcaacatttgtcggatattgtttcccatgccatgcaggccgcaatcagccgcgcccaggagatggagaaactgttttaatccatccaatggctgataagactgatttacaaaacaatacgctccccctaagcctttatcattaagatagaggtactttacagacacttgaatatgattaaggactaaaggcaaccatgctaacgctgacttttttggctaaaaccgtcattgacctttacgtcatggtgctgctattacgcatctggatgcaaatggtacacagtgacttttacaacccgttttcgcagttcgtggtgaaaatcactcagccgatcgttggcccgctgcgacgaattattccgtcattaggcccgatagatagcgcttctctgctgttggccttcctgttgatgaccatcaaatacccgctattactgctgattcagggcggcggcatgtccctcagcccttataacctgctgtttggcgtaatttcactggttaaggccgccggttatctgatcttctgggtgatgattatccgtgcattgatgagttgggttagccagggccgaagcccgatggactatctgctatatcaactgaccgagccgctgatggcaccgatccgccgtattctgccagcaatgggcgggatcgatttttccggcatggtagttatcctgatcctgtatctgatcaattatttaggtatggatctgttaggcgagctctggttcgtactgtgagtgcagtcactcccctgctggacgggctggcgatcaggctatatattcagccgaaagccagccgcgatcagattatcggtttacatggcgatgagttaaaagtcgccattaccgccccgccggttgatgggcaggccaacgcccatttgatcaaatttatagccaaacagtttcgagtggccaaaagccacgtcatcatcgaaaaaggtgagctggggcggcataaacagatcaaaattattcatccgcagcagattccacctcaggttgcagcactgctcgaatagtcggataactccgctgctccattttgaatggcacgaaataaattcaatcaatggcacaaaaccatcaggtttatctcacgatggaaagcaggttaccggcgtaacaatcaatcaggatttaccatgcaaaaagtcgttttagctaccggtaacgccggtaaagtacgtgagttagccagcctgctggcggatttcggtctggacgtggttgcgcaaaccgagatgggcgttgagtctgcggaagaaaccggtttaacctttatcgaaaatgccattctgaaagctcgtcatgcggcacaggtcacaggattgcccgccattgccgatgattctggtctggccgtcgatgcgctgagcggcgctccgggcatttattcggcgcgctatgctggtgttgatgccagcgatagggaaaacctggagaaactgttggtaagcctacagaatgtgcctgaaggacaacgcggtgcgcagttccattgtgttctggtgtatatgcgtcacgccgaagatcctacgcctctggtgttccacggcagttggcctggcgtgattgcacgggcagcatccggcgcaggtggctttggctacgatcctattttttacgtaccggaattaggcaaaacagccgcagaactgagccgcgaagaaaaacaggcagtatcgcatcgcggtaaggccttgaaattaatgctggatgccctgcgaaatgcttaagttgccaccgcttagtctttatatccatattccgtggtgcgtacagaaatgtccttattgcgattttaactcccatgcgttgaaaggagatgttcctcatcaggaatatgtcgatcacttgctggccgatttggacgccgatctgccgctgaccagcggacgagaaatcggcaccatttttatcggcggcggtacgcccagtttactgagtgcagaagcgatgcaaagtctgctggacggcgttagagcacgcctgccggttgcagcagatgccgaaatcaccatggaagccaatcccggcaccgttgaggccgatcgcttcagcggctaccagcgggccggtgtcaatcgcatctctatcggcgtgcagagctttaacgagcagaaattagtgcgtctggggcggatacacggcccagaagaggctaaacgcgctgcggcgctggcaacctctttgggtttacgtagctttaatctggatttgatgcatggattgccggatcaaatgctggaagaggcgctggacgatttacgtcaggccatcgcactaaacccccctcatttatcctggtaccagctaactatcgaacccaataccggtttcagctcgcgtccgcccaagttgccggatgatgatgcgctgtgggatattttcgagcaaggtcaccagttgcttagcgctgcgggttatcagcagtatgaaacctcggcctacgcaaagcccggttaccagtgccagcacaaccttaattattggcgctttggcgactatctgggcattggctgcggcgctcacggaaaagtgacttttagcgatggtcgcattcttcgcacggtgaaaaccaagcatccacgcggtttcatgcaaggcaaatatatggacaggcaacatgaggttgaaatagccgaccggccgtttgaattcttcatgaaccgtttccgtctattggaagccgcgccgcgcggtgatttctataattttaccggtctggaagaaagcaccattcgctcgcagctggatcaggctatcgccaaaggctatatgctggaaaccgatgaacactggcagattaccgaaaaaggaaagctattcctgaattcattgctggaactgtttttatagttgtcagagcgcatcgtaaaaaaacgggcattcgcccgttttttattttatcggatggaactcaatttaaggctttgagcagctcaatacgctgttgctctagcgtggtcacccgaccgcaaacttcatggccgaagttctggaaatcttgttcctgattgttccattcagtctgaatcgcttgctgcaacccccccagattgcccattatcgcctgcaatggattattggaagaaccgctcgtcgcctgcttaacgcccatttcattcaggctatcctgcaaaacgccccccagactctgttgcacgatggcgcgaccgtccttctctacttgggcaatggcctgatggtggaaagtcagaccgtcgctgcgtttctcaatgatgcggctcatttgctgtttcagctgatcgttcaacgtcgtcagccggttacgcacattactgctgctccccaactgttgcacaatgacgttatccaaagaaacccgggctttttccagatgctgttgcgcgcctttatcaatccacggcaaatctttacgcaatgcgctctgatagctgaacgctttctgccgctgagcctctgtgagagtcaatgttttgccgttgcgaatcacatcaccatccggtgagatttgcagatttccgctggctcccacaacctgtacgctctgcggactgataatcacatcatcctgaggttttacgttgcactgatattctgcgtgaacctgtcccgcagccaataacaaaagcgccagtcctgcttttcgtaacatagattctcctgagaaaccgtttatctaccgctaattatgacactgcctgagttttatcgccgccagtagtggactgatcctaaaagattgagcgaccaatccgctgggcaagtaactctaaggcagcggttccggccaatgagttccctgagacatccagttccggtgaccataccgcaatgcacatctcatcaggcaccacggcaataattccgccgccgacaccggatttccccggcatacccacgcggaatgcaaactcgccggcaccgtcatacataccgctggttatcattaacgcattgatttgtctggcttgaatcggtgaaataatctgttcggcatgattgattggccgcccctgatttgccagataaacaaaacagcgagccagctcgatgcagctcatacgcatggcgcaataatggaagtaagtttgcagcacggtcaaaacatcgttgtcaaaattgccaaaagatttcatcagataagcgatggccgcattgcgatccgaatgttcaaattcagaacgtgccacccggctgtcatagccgatagagacatcatcgaccaactggcgcaccacttccagcatccgctgcttaggcgcactcaggcgactttgaagcatgtcgcaaatcaccagcgcccccggattaataaagggattacgtggcttcccttgctccaactccagctgtaccaatgagttaaacggctggcccgatggctcttttcccactcgccgccacacttcatcctcgccgtagcgccctaaagccagagtcaggctgagcactttagaaatcgactggattgagaaacgctcttccgcatcacccgcctgaaaaatctgaccatcgacgccgcaaaccgcaatacccagcttatctgcggaaacttccgccagggctggaatatagttagcgactttcccttgcccaatcatcggtctaacctgatcgaggatatcttccaacagcgtattcgataacgtctttaccacggaaatactccagtactttccccaataaaaataaaggcgcctatagcggcgcccttattatcaaacagtggtcagatcgttaggatcaatcccaccagatatcaaacagctcgctggtttctacgtttttcattttacgagcttccagccatttgctgaccaatgcacggtgctcatcggtgcaatgaccgatttcctgcaggcagattaggccttcccactgcatgtagccactaccgtcgaaagccaaaccgtttggttcaataacttcgtcgataaatgcgtctacggtggaatcgatcacatcaacgccagtgccttcagggaaggtccactgaacggagaaacctaattcctgaaactcatcgatgtgcattttcttgcgtaaacgacgactgcgattgttagccattattctttcctctcaaacatcagatcccaaacgccatgtcccagacgctggccacgtaattcaaatttcgtcaacggacgtgaatccggacgaggaacatagtcattggtttcggaaagattacggtatccggagacggccgacatcacttccaacatatgttccgcataaggttgccaatcggtggccatatggaatacgccgccgacttttaatttactttttaccagttccacaaacggagtctggacaatacgacgcttattgtggcgcgccttatgccatgggtcggggaagaatagctgaaccatatccagcgaaccttccgggatcatgttttccagtacttcaaccgcatcgtgacacatcacgcgcaaattgttcagttccgcttcatgagcgctgcccaaacaggcgccaacgcccggcgagtgaacttcgatacctaaaaagttctgctgcggattattggctgccatggtgaccaaagaggtacccataccgaaaccaatttccaatactgtcggcgcttcacggccaaacagcgtgctcagctcaaccggggtcgtttgatattctacgcccatcaccggccagtagttatccagcgcaaactgttggcccttggttaagcgcccttgccggcggacaaaactacgaatacggcgcagtgcgcgaccgttttcatcaaactccggagatatgacgtcatttatcatggtgctttctgtctgttgagttgcgcaaaataagaacgcgcattatgcaaagatacgctagtttatcaactatgaacgcgagaagtacaaatttaaccacgaaatgattcattattaccgacgaaacttcgccaacccctcggaaagttccggtttacagccttcagactctatgctgcaatcccagccctaaattatttctctgccggatatcgatacttacctatgatgcaagcgcaacagttcgcgcaagtggtgcttgactggtaccaaagctacggtcgcaaaaccctaccgtggcaacgggacaagacaccttaccaagtatggctatcggaagtgatgttgcaacaaactcaggttgccaccgtcattccttacttccaacgctttatgacgcgtttccccgatgtgcgggcgctggctgctgcgccattggatgaagtattgcacctgtggacaggtttgggttactacgctcgcgctcgtaatcttcacaaggcggcgcagaccattgtggccaaacatcagggtgaattccctaccacttttgaagaaattgccgatttgcccggaattggccgctctaccgcaggcgctattttgtcgctggcgctggggcagcatttcccgatcctcgacggtaacgtgaaacgggttctggctcgctgctatgcggtagatggctggccggggaaaaaagacgtggaaaaacggctatggcaaatcagcgaagacgtcacgccagctaagggcgtgggccagtttaaccaggcgatgatggaccttggagcgatggtttgtactcgttccaagccgaagtgcgaactttgtccgctaaacgctggctgtattgcatacgccaaccatagctggccacaatatccggggaaaaaaccgaaacaaaccataccggaaaaaaccgcgtatttcttattgattcaaaatcatacgcaggtttggctcgagcagcgccctcccgttgggctgtggggcggattattctgcttcccgcagtttagtgaaagagaagatctcagtcactggttgcagcaaaaagggctaccagagcaaggtttgcagcagctaaccgcttttcgtcacacctttagccacttccatttggatatcgtgccgatatggatgaatgcggtaaccctgagtggatgcatggatgaaggagcgggtctctggtataacttagcacagccaccgtcggtagggcttgctgcgcccgttgagcgcctgttgcagcagttggccaagcagcctcctacccaagcagctttatttggcgatagtgccacaaatgaggatttagcatgagcagaacgattttttgcacatttttacaaaaggatgctgaagggcaggatttccagctctatccgggtgaagttggcaaacgcatttataacgaaatctcaaaagaagcctggtcacagtggatcactaaacaaaccatgctgattaatgagaaaaaactcagcatgatgaatgtggaagaccgcaaattactggaacaggaaatgattaacttcctgttcgaagggcaggatgttcacatcgaagggtataccccgccgagtaagtaacgccaaagggccagtcatggccctgatgttattcctcatcacgatatggcttgtaagatgaagaaaattttagctttgctagtgattgccccattattagtttcctgctcgggcaataaagatcaggccaataatgaagcctttatcaaagacaccaatgggttcgaaatcttaatgggccaatttgcccacaatatcgaaaacatttggggtttgagtgaagttttgatcgccggtccgaaagactacgtaaaatataccgatcaataccaaacccgtagccacatcaactttgatgccggtaccattacggtagaaaccatcgcaacaaccgatcctgccgctcacctgcgtcaggcgattatcacgactttattaatgggtgatgatcccggttcgatcgacctttattccgatgttaacgacatccagatcagtaaagagccgttcctttacggtcaggtgttggataacaatggtcagccaattcgttgggaatggcgggccgcgcattttgcagattacctgttacaaaccagaatgaaaaaacggacttccggtctgcatgtcatctggtcggttacgctgcaactagtgccaaaccacttagacaaacgagcccacaaatatctgccgctggttcgacgttcggcggaaaaatatggcgtggaagaatcgcttatattggcgattatgcaaacggaatctagcttcaacccttatgcggtcagcggttctgatgctctgggtctgatgcaggtagtacagcacaccgccggtaaagacgtattcagattgaaagggaaaagcgggcagccaagccgtagctatttattcgatcctgaaaacaacatcgatgcaggtacggcttatctgtctattctgcaaaatagctatctcggcggcatccagaatgccaccgcccgtcgttatgcggtaattaccgcctataacggtggcgcaggtagcgtattacgcgtattccatagcgataagaatcgggcgttctccattatcaacagcatggcaccgggtgatgtattccaaacgctaaccaccaaacacccggcagcggaatctcgccgttatctggtaaaagtaaacagcgctcagaagagctatcgccgatattaatttagctttattcctaaataaccggtaaaaatggcacagttttctgtgccattttttttattctcagaaagcaccaataccactctttgccagacagaaattgtgttcattatcacagtgcacgcaagaacaatgggaaataaaccacggcagcctatagtaaaagctcctcccttcttattactcagactgaacaaatggatcttggatttacgctattcgaattagcagccatatttgccaccatggttgtcgcctacattatctttggcctgaccgggttcggctccgcacttattgctagcccggttttagcactttttatcccagtcgcaaaaattgtccctctattggcaatagtagatatgttcgctgccgttactaacgtcgccagacacagtaggaatgccgatcttggtgagcttaagcgactgatacccatgatgattatcggcagcttaattggcgctacaattttactcaaaacccgtccggacattcttttattagccttagggatatttgtcattctttacgcgctctattctttgagtcgacgtaaacctctggggaaattcaaaacggcggcagccgtgccttttggcttagtcggcggcgtgtttagtgcgctatttggcagcggcgggtttatctatgccatttatttatctggtcgaatagaaagcaaagataacctgcgcatcacccaaacaacattgataggtttgagcaccttcacccgcgttattttatttacgctggccggtgtttatatggatttatcgatcttattgatggtgttgctgttagccccaggtatgctggcaggcttaaccctcgctaataggatcagtttaggtatcaaccgcgagcagctaataaaactaataaatatcctgttactgttatctggtctggttctgttaggtcgctatttcagccaataatatgcatctccagataccaccggctaacccggtggtatcagaaaaaaatcagtctgcgatgacgtaccccaaaatacgtcgccactcaacgtcacccttttcgatatatacgccctgtaattccggtgagaatcccggtaataggttaattccctcttccagtgcgaggaaatagcgctgagcggcaccaccccatacttcaccgggaacgacgcaaagtacgcccggaggataaggcaaagcgccttctgcggcgattcgcccttcagcttccgctatcggaattagctcaatattatctcggataaactgaatattggcatcctgcgaattcatgactacctgcggcaagctggctttgcggaacatctctttttgcagctgttttacgtcatgactcacgtataaattgtgcatttcctgacataaacggcgcagagtatatccgcgataacgctgctcattcttccgatataccgtcggcaatacgtcacacagcaatgaatcttgcccaacgtgtcgctcaaactgcgccaacatttctaccagatgagccattttagcgctattttcagccggcgtgagcaagaacaaaattgaattaagatcgcacttctctggcacaatgccattttcccgcaggaagtgagccaaaatagtcgcgggaataccaaactcgctatattggccgctggccacatcaataccaggcgtcgtcagtaataatttgcagggatcgaccagatattgatcgtcggtataaccatcaaagccgtgccatttctctctaggtacaaaatcaaagaaacgggcatcattcgcaattgtctcagtggcatagtcctgccagttcttgccatttatctgtagcgggataaagggttttagcaatgagcaacgttccaatattaattttcgcgcctcgatacccaatctgacacaatccatccacatattgcgaccactggcaccagaatgaattttggcattaacatccaacgcggcaaacagcggataaaatgggctggtagaagcatgcagcataaaagcgttattaaaccgtttatgattacagtgtcgtttctgccctttaatgtgattatcttttttgtgcacctgtgaggtttgggagaaaccagcctgctgtttatggactgactgggtcacaataatccctgggtcatcttcatttaattccagcaacagcggagagcaatctttcagcatcggaataaactgctcatatcctacccacgccgaatcaaacaaaatgtaatcacacagatgaccaatgctgtccacaacctgacgagcgttatagatcgtaccgtcgtaggttcctaattgaatgattgctaatcgaaatggccgagcttcatcggcacgctcaggagcgacttcccgcaactgctgacgtaaataacgttcattgaagcaatgtgcatcaattccgccaataaaaccaaaaggattacgagcggtttctaaatatattggcgtggctccggcctgaatcaacgcaccgtgatggtttgatttatgattattacgatcgaacagcaccaaatctccgcgagttaatagtgcattagccaccactttattagctgcagatgttccgtttagcacaaaataggttttgttagcgttaaacacttttgccgcgtgcttctgcgcatctttggccgcgccttcatggatcaacaaatcgcccaatttgacatcagcattgcacatatcagagcggaaaagcgtttcaccgtaaaattcgtaaaattgccgaccggccggatgtttacggaaaaactcccccccctgatgaccggggcaggcaaaagtcgagtttttcatttcgacgtattttttcagcgttgagaaaaacggcggtaacaggtttttttcatattcagcagcagaggcttcaagttgagcgagataaaaagctttattattttcgcccaaagccattacacctttaatcagtggcaggtaatcaacggacacttgttgatcgccttgcgcagcaataaaagtgggtatcccgaagccctgattatgcaattccgccagaataccgctattgacgtcttccagagaaaccagaatcaccgcgacgtcggtaaagtcagtttcataaagacatactacctcgcgtggggtagccagataggaaaccaaatttgcgcttgctgctattttcaactgtgtcatgttaccgagtctcaaactgtcagggatgagtcgtgccacccaggcacaaagatgaaatcttatgagataaatacacctaataatattccgtaagttgctattgaattagctgaatgactgatgaaccgatgtggagaaaaacacgagcggagcatgatctatctcatttcagctgtaaccaatagacatcagtaaaatcagagaatgaactctagttttaatcatgcctaacagtgagcagaggtagccttaccgcataggagaaacagcagaggaatcatagaagggcaagaaatagtgataggaataaatcattggctgacgggggagattttgcgtcaaaaaaaaagatacaacacttgtcatggacgcccctctttagcctgatttagcgtaataggatatgagtttcgcgcaataattgcatttttattagtgtgactcaagtggtaaatattcactaattgtgaatatttaatccattgttatgcaatcaactagaaattaaggggttatggttcgcaggcgctaaaccacactgtcactgattccctcctcctcatcgggctgtatttcaccttacctgaccgaaaaggcagcaaacgatcgactttatgacagaaactcattgacgatttagtgccaatacggtttaatgcgccccgttgcccggatagctcagtcggtagagcaggggattgaaaatccccgtgtccttggttcgattccgagtccgggcaccatatttagagaaaccagcctacggctggttttttgctttctggcatctggactcttcatcgaacacgttcgattattcgagccaaaggctctcaccccttcggggccgtcgcaagcgacgttcaaagccgcctagcggcgttgtccgagtccgggcaccatatttagagaaaccagcctacggctggttttttgctttctggcatctggactcttcatcgaacacgttcgattattcgagccaaaggctctcacccctgcggggccgtcgcaagcgacgttcaaagccgctgaaacgaaatgtctcgcaaactcagatgtcgtgcaaaacctttattacatctgggtatcgtttcactgcttattctcttaaccacttccccacggcatagtctaataaaaagaatcgcagataaaccatcgccgatgctgtctgactccaaaatgaactgcactcgataaaaagactatcgggctaatgaacatattgagggagagtagcggaatgactcaaataggaaaaatttatgctggcaggttaaatttattcgttacttagatattgataataactctctttcaagatcttttacgtcaataaaaaattaatataactaatacaggatgcttatcatttatttctcaatcaaatttataacccaatgaaaaacagtactaattacattataaaagcagagattgaatgtataaaaaacataagcctatacttcacaataaatacaataagggtgacatgcgtttattatcatacaaaataaaaaagcaccagcaatacaacaaattgtcagaaaaacctcagccataaaaatctgtaggaattttcccacataaattggttcgcttatcctatgtccagccagatatattttctatatcattctctcatcaagtaatagacgcagataaataatgactgccaaattacttttaataaaaggcacgtggaaacctgacgagtataaccgaataacattcgcgaacatagtcactagcccacttcacatatataaagttaaacactcattcctatctaaatacgaatgaatgctaaccgcacatttaattattgtattggagttttaaatgaataagattactttggctatcgcgttattctctgcatccacaaccgtagcaatggcggcgagcaataatacaattacattccaaggggaagtcacagcgcaaacctgttcagtgacagtcaacgggcttgacgcaaacccaatggttttgctgccaacggtatcaagtacagatttagatgcttctggtaaaacagcaggtaagacaacctttactctgggtgttgccggctgtgctccaggggttgatgatattgacatcaaaactgtgtttgtaggtagccaggttactaccgccggtaacctaaaaaatacaggcaccgcaaccaacgttgaacttcaattactgaaagactcaaccacaacaaccggtatcgatctgaatagcggtgtagcacaagatggtatcgtgttaaaagcgggtgatacatcagcagaacatgattttgccgttcaatactatgcaacagggaaaaccaccccaggttcagtcattgcctctgtccaatatgcggtttcttacctgtaaaaaaataagcgtgaccgtataggatatactttaattaactggtgcggcaggtacgctgcaagtaagtaaaatcacccgaggaacttagtaataagttgctcgggtgaatgtatgcagcatatctctgaccacactcggcaaccagggatatagttatttcgcccgcatttagaggatatcctcatggcaattaatatacttggttaccgttacctgtttatcactcttttacttttcataggcatgtctttcgctcaggctagtgtagtcatgaacggtagccggattatttattccgcaggggaaaaagagcacagcgtacaattaaccaataatgatagctttcctaatgccattcaggtttggctagacagcggcgatgcccagtcaacaccagacacaggcaaggctccttttatcgttaccccaccgttctttcgcattgaagctaatgcaggacaaacattgcgcttgaaatataccggcagtggtctgccgacggacagagagtcagtgttctacctgaattttttacaggtgccccccgtcaataaagcagaaaaaaataacaaaatgttagtgctgatgcgtaatcgcattaaagtattttatcggccagaaaatattgcaggccgcgtagatcaggtacccagcgcactcacttttagccttcaccaacgaggcaaggatgtcgttgtcacaggaaagaaccccactggtttctatgccactattgccagcgcggaagtcgttggaagtggtaaaaaacttaatatgaaatcagaaatgattgcgcctatgtctcaagctgagtgggttattccgaattcatcggccccctcaaatgctaccgtaaagttcctactcgtgaatgatttcggtgggcaagataccggcagttataaaattcagtagcatctttccggcgaaggaatatttatggggtttgtacgtgtcagtctaaaaaagaagttctccggccgtaaaaaagcattaactttgtgtattactttaatcttatatgttgatgcgcctttagctcaggaagaaccgcaagacctcgaatttgatgaatctctttttctaggaacaaaattcgcctcaggtttgaatcaactgaataaagagaatgccgtaaccgccggaaattacgatgccgtagatgttctgattaataacaggctatttaaacgtaccactgttaaatttattaaaaatgctgattcgtcagaggcctacccttgcctgaatgatgaattcttaacagccgctggcgttgaactcacggctaaaggcgattccctatcccgacaacccaacacacctgaaatagagtcacgcccttcagattctgcgattccgctgatagaacaatgtgttccactggccgagcgggtcaaaggcgcgtcttttcactttgatcaggcaaaactgcgattagagctatcaattccacaagccttattaaaaaaacggcctcggggatatatagagcggagcgaatgggaagaaggtgaaaatctcttattcgttaattacagctccaacttttatcgcagtgagacaaaatcccaacagcaaaatagcacctctgattatgcttttatgggattaaaaagcgggcttaatttaggattatggcaaatacgccagcaatccaacctgcgctattccaataacagcaacggtagcgatagccaatggaataatattcgtacttatttacaacgccctattccccaattagatagccaattaacgctgggcgaaactttcaccgacagtacgttatttggcaccctgtcatttcgtggagcaaaaatagccaccgatcaacgtatgtggccggaatcaatgcgcggctttgctccagaagtccgtggagttgccagtaccaatgcgcgagtcattattcgccagaatggccgtgaaatttatgaaaccaacgtcgcccccggcccgtttgttattaatgacttatatagcaccaccagccagggtgatctcaacgttgagatcatagaagcgaacggtagccgttcaacatttactgtgccattcagcgccgtacctgattcaatgcgccctggcgtgagccgttatagcgccgttgccggggcatcacgcgactttaccaacattgataactatttcactgattttacctatgaacgcggcctgaccaatcagctaacgggtaactccggtttacgattagcgaaagactacaccgcgctgctggccggaggagtcattggcacttcagtcggcgctttcggcctcaataccactttctctcacgctaaggtcgaaaatgaccaaacccagaatggctggcgtatgcaggcaacgtatagccaaacattcagcgaaaccggaacgaccttttcgttggcgggatatcgctattcaaccaaaggttatcgcgatttaaacgatgtatttggcgttcgttccgtgcaaaagaacggcggaatatgggattcatcaacctataaacaacgcagccaatttaccaccacaatcaatcagaatctggggagtttcggccagctttatgcctctgcctcaaccagcgattattataatgatacgcagagggatacacagttacagctgggttattcaaataactatagggatatcagttataacctggcgattagccggcagcgtagcgtttatacctcgacgctgtatggttgggaaaccgaagatagtaataatacgacgacgacacgctatggtaataccgaaaacatcgcgacattaacgctgtcaattccgctaaatatcggcagcaaaagccaatatctgtcgatgtctgccaaccgtaatccgaaaagcggcaatagctaccagacatcgttatcaggcactgccggtgagcggaattcctttaactattcggttaatgctggctatgacgataataaaatcggcaataactcaaatagttggggagccaatgtgcaacaacaattccctaatgcgaccgtcaacggtagttattcgcgcggcaataattacacccaatatggtgccggtgcgcgcggtgccgcagttattcacggcaaaggcgtaacatttgggccttatttgggtgaaacattcggtttaattgaagcggatggcgcccaaggggcaagcgttcgcaacgcacagggggcccggatcgataataacggcttcgctctggtgccagccttaacgccttataattacaatacgataggtttagataccaaaggcattaatcgtaataccgaactgaaagaaaatcagggtcgcgtggttccttacgccggtgctgcagtgaaagttaaattcgagacactgaccggctatgcgatgttaattcagactcaaaccgccgacggtgaagggttaccgctgggtgccgacgtgtataacagtcaagatgacattgtcggtatggtgggtcagggaaaccagatctatgtccgtgtgaaagacaaaaaaggttcgctgcatgtccgctggggcgaaaacagcggtgatcaatgtgagctaccttatactttcaatgatcaggataccgagcaagatattattcatataacaggcagttgccaccgttaacaattatgagaaaaataatgttaagaccaacaaagcagttaataccttgcgaagtctcacggccaacgtccactgcctgttatcgccgcccgcgtattctggctggtttaataatactgatcgggctaagcagtggttctgcctggtcagcctgctctaaaattaccgcgcaaagtcagctaggtaccggtgatggaacggcgggttcctgggcgggttctctggataacaataatggctcgctgggtttaccaggcattatcgacctcagtaccaatgcaaatttccagccggatggcacattattagcagcggcgacatcaaactttaccacttttgccctgaatactggctatgatcccgaacgagtgctgttccgctgtgatgcagccgacgtagatcagatcttcgaaatgtatgccacaaacggtgataataattatgcgggtaaaaatgaggacggcaccattgctggcaacgttccctctggcttcgccacctatgtacgtaacgttgttatccgtattactaatttatcaactggtgagtattactctagattatggaaaggccgtcgcctgaccgatcttgataaggacagcaccggccgtattctggttaaagcgaagaacttcagcaatatctataccgaactgtttcgcattgattatgcccgaagtggtaccaataacgcggcttcttatacctatgcctacactcagcccaacgcctatattgcctttaaagggccgggtatcaatgggccgattgaaggcactgatgcggtatcaaactggcccggctggtatgcaacctggcctgcgtcaatcggcctgtacaattatgttaccttccgccggacgacgatttgcgccgtgaccaattttacaccaacggtgatattacccagaatttctgtagcagagctgaatagcggcaacaccagttcggcggaatttcacgtggattttcaatgccaaactggcatcacatctggagtgacttctggcgcagttgcgatgggctttttggttcccgcagcaaacgcagcaaaagctcaatcattgggattaatgaatggcagtggcggtatcagccatttgatatcagataattatggtgcatccggaacggccagcggtgtcggtatccgtatttatcgcaacaataacccaattaatctgctatcaaaaaacgtgacattaaccggtaatagcggtggctggtatggcatcttcgacggcgcgcagcaaaccaccggcagtgtaaccggcggaaatagctacactgaaaactttcgggctgagttaggcaagatcagcgggcaaactgttacgccaggagcggtgaatgcacatgcgcaagtggttatccgtgttcaataatatgccattcaaacgcctgactagcggcatcacccgcttacttttgctactaatagtggctcatagcacacccgccgtggccagcgtgatagcggaaagaacgcgcgtgatctttagtgaaggccataccgaagagtcactgcaattggttaacagcaatagctatccagtggcggtgcaggtctgggtagatgatggcgatttaatggcaacgccggagaaagcaatttctcctgtattagtgcttccgccgctgtttcgtctacaacctcaggcgcagcgcagcctgcgactcattttatccggcgtcagtaagttgccgacagatagagagtccgcattttggctcaatgtctacgaaattccgccaaagaccgtcactcaagtcgataacgagtctttcgtgacattggcactacgtatgcaatacaaagtattttatcgccctaagaatatagctgcgccgggagacacgctgagtaaagcattaaccttcacgttagagcgcaacggcgataccgcagtggtcaaagttgataatccgacgccttattatgcatcggtcgcctccctgacattaggctcagcggaaagtctgccggatatggtttccccgtattcaacgctcaactttcctctcaaccgctctccggcagctggcagcactagccttacttttgctttgattgatgattcaggaaacagtaagggttttagcgccaatctaaaataaagcgtgtttctgtagcaagcgcgcggtcggatgctttccctccgcgatttgcatcactcccctcgccgtaatgccacacggactcattccgtaaaaaccctgtagatcagagcgacctaattgttctatttatagaacgtaatgagctattttcgcgtctactccgcttgttgttgtgaatatatagtaattaagtgaaacagctttgctgaaacctaaccgattcggtcgcacctaagtacaacaaaggagaatacgatgtctatcccagctaatttcaatggtcaacgcccagttattgatgtcaacgattccgtgatgctgctgattgatcaccaaagcggcctcttccaaaccgtggccgatatgccaatgccggagctacgcgctcgggctgctgcgctggcaaaaatggcgaccctgtgcaacatgccggtaatcaccacggcttccgttccacaaggtccgaatggcccgttgattccagaaattcatgcaaatgctccgcacgcccaatacgttgcacgtaaaggagaaatcaacgcctgggacaacgaggatttcgttaaagcggtaaaagcaaccggacgcaaaaccctgattatcgcaggcactattaccagcgtttgtatggctttcccgtccattagcgccgtcgccgagggatataaagtgttcgcggtcatcgatgcatcaggcacttacagcaagatggcgcaggaaattacgcttgcccgcatcgttcaggcaggggtagtaccaatggataccgccgccgtggccgcagaacttcagagcacctggaatcgcgcggacgccgaagcatgggcggaggtttacactcagatattcccagcctatcaattgctgattgaaagctatagcaaagctcaggaagtattgaaaagtaacgaaaaactggattctcagcgttaatccgcaggtaatccatagttagacaagcctcggttgaacctgtttcgtaccaacggacaaccgaggcttgaatcgaatagaccagtgccctatcgcccttcttttatcgttccgaatcgttcagccagaaaatcaatcaaggcgcgaatagatggaagcagccctcgccgagaagggaataccgcatgaataatttcccgacatgtcgcccagtcaggtagcagacgaaccaaacggccatgttcaagctgagatcgcaccatcatcgccggaagctgaaccacaccaactccggcaattgccgccttgcataaggtttccatatcggtagagacaaatttaggcacatggtgctgggtggtttgcatcccatcggctcccatcagcgtccaacaatgtttttccatagaagacccgtaaccaagcgttggccacgacgccaaatcaaccggcgtcaacggcataccatatttttccagtaaaatcgggctagcgacaaggtactgagcggcatagcccaaccctcgcataactaaatcagccccatccacaggcaaaggctttaccctgatggccagatctacaccttcagtcagaatatctacggggcgattcatacctaagagctgaatactgacatcggggtattgtaaggagaaatctaccaacatatctcccacataggcatgcaatatagttatcgggcaagccagtcggacggttccgcaaggcacggactgtgctgattcgataatggcctgcgcggcttcagcctcaactagcatagatcgacactgggtgtagtaagcctgccccaattcagtgacggtaaaaatacgggttgaacgtaggataagccgcactcccaaacgttcctccagcataccaatgcgcctgctaagttttgatttgggcatatccagcgcgcgagcagcctgagaaaatccaccgtgctccactacctggacgtagtaatacaggtcattaagatcttgacgcatagaaaatttgtttaaaatacagtgtattagagaaaaaataacgtatagcacacatactgatatttgatttaccgatactgctaaagaatgctgcacacctgtttttctacactccgacttcctatacctctattccttatttattaagaaaagaatataggtggagcacagcattctacttagatcatcaggaagattgggattccgatttatcctctacttcacccgtatgcttgccttcatcggttcctttccaaccatgacgctgaatgagggaaagatgagcgcgttcttcggcaaggctttccgtcagcatttcgctggttcgcttatatgccgcagcgcgagactgggtatcgctctccccttccgccatttcctgtaccatctggagattaaatctgcggaacagatcggcgcgctcccgcgcttcatagcggcccagaccgagtttctccaacgccagacgcccgattttcaacgccccttcaaaggtttcacgctccggttgagcaacgcccgcgtgtttaagctgaatgtaatgctcgacatcccgcgctctagcaatgatttgcaggtttgggaaatgctctttcgccatttccgtaagctgcatactggttgccggatcgtctatggcattgattaacacttccgccttgactgcccctgcggattccagcaaatccatacgtgtcgcatcaccataaaacactttcattccgaatttccgcagggtttcgatatgctcaggatcgtgatcgagtaccactaccttcacgccgctggaaagcagcaagcggcctgctatctgcccgaaacgaccaaatccggcaataatgactcgcgtctgttcttcatcaatttcatcggcttcgcgctccggtccgtggtcggatttctccattcgcgccaacaacactagtaaaatcggcgtcatcgccattgaaagcgccacggccaaagtcaaggatttcacccagtctggctctaacacattcgccatttgcgccgcgccaaaaacaacaaaggcgaattcactcccctgtcccaaaaatacggcaaaccaatagcgctgcttgcgaggaacattaagcggacgcgcaattaaccacaggactgtcgttttgatgatcaggaagcccgccagcaaaacgataatacgcagcggattatcgatcagcgtgccaaagtcgatcgacatcccgacaccgataaaaaataaccccaataacaaacccttaaagggttcaatatcactctcaagcgcgtgtcggtactcagagctcgccagcaacaccccggcgagaaaagcccccatcgccatagataatccgacttcttccagtaatagaccaaagccaaataccagaaatagcgctacggcactgaaaacctcgcgtaaaccagagcgagcaacaaaacgcagagccggacgggtgacataacgccccaacaaaatgaccaacgtaagcgttccggcaactttcagagctgaaaacgcaaaagcagccagagtggtggatgattcgctggcagctaaaagtggaatcatcgcaaccagaggaatcgccgctatatcctgaaataacaatacggaaaaagcgctgcgccccatctgcgaagccattaaatttcgttcattcatcgcctgtatagcaattgccgttgaggagagcgccaatgttagcccaattaaacaggcaatttgccagcgcagacccagcaacatacagaacaacccgataagtgcgccgcaggccaccatctgtaatgctccaccgccaaagacggagacgcgcaaattccacagtcgctgcggatcgagctcaagaccaataataaacagcatcaataccacgccgatttcggcaaaatggagaatactgtcaacatcggtaaccagccgtaatccccacggcccaataatacatccggcgatcagatagcctaataccgaacctaatcccaaacgcaccgcaattggtacgatcaacgccgctgcaccaagataaatcagtgcctgtatgagcatatggctatccataaaacgcctccttccattccatcagacggtgtttgtaatgacgagcctgggcctgaagcgtttcatcatcacaaataaaagtattgtgcatggaaaaaggcggtaaccatttcagaccgcaataaagtgccgtggcctgaaacggctgagcaagcacctcaaagccgggatgactccccatgccaaaatgattttcgccaccgccggtggtgaccgcccacatcagattttttccacgtaacgccgtaccaccgtgaccataagcccaaccatgagccaaaactttgtccatccacagcttaagcagcggcggcatgctgtaccactgcatcggatgctgccagataacgagatcggcacgagacaacgctgcctgctcagcggcgacatcaatattgaaatcgggataaagttggtaaagagagcgaatttctacaccttcgagagtctccgcctgctctatcatgcgtttgttcgcatgagaatgctgcggataaggatgagcatatataattagaatcatgtcttttccaaaaagtattaacgcacttaattattactattaagataacctgttttaccaaaacgctttattcgatattaatatctatttatatcaatcaattacattattgagtttaccctttatcaacaatggcataactgcgagacgcttagattaaaagcgctcacataatcaattataggtatgcctcaccctgattctcttcttcctggcaattgaatctctgcgatatggcattctttagcgatatatccttagtctgttgcacttttccggcgttttctcaggaggccaaaactcctttcgtttagcgaggctaatcagttaatctccgctcaacagacccagtgcattaatatgaagcaggaatgttaatcaccctatttattaacagataaattaaaacaatactaaacagtaaagctaattcttactcataacaatcacaataaaattgaaaaaatgagaaaaatccgagaaaaacaaatagggatgtccaacgaaaatgcaaagctggattgggtaaccaactaatttaatgatgaaaatcaattttgaaaaaaagaaaaatataatacccaagactacaataacaaaagatcaaaaagtactaccagtcacacgttttgttacttcgttcaaaaaataaaactcaagtataatttagcgtgttaattaatcacctcatgaattatcattcttatctaataaatgactcactcatatggagaatgataatgaaggtcttgtttatcgatggagcacaaaagtcattgcattatgataataagaagatcgtgctgacagaaaaggaatttttgatgctacagttcctgctcaatcgcaggaaaaataatagtattcctataaacgaaatcgtcactcacgtttggaaaggtagagagagcattatcggtaaaggtaacgtttcgcagctggcttatcgtttaaggagtaaattatcaaccataggtgatgtcattcagatatccatctcaatgaacaacggcggaaattgcaaagtccagcggaacatcataacaattattgcaagcaataatgggatcatgtgttttctggtcaagttcttactgaacattaaggaaaataattcattataatcaggattaacctcaatataagtagatctgaaactctgacagtataaccaacaggtatataaccaaagataatccagcgtctcaaactggataaactaaaagaatcgtaaataacttgaatagaacagaagcaataatttattatttataaataatcaaaccattgagtatcgaacgacaatgagaaatagcatttaacttatccaaacgaatcgggcaaaacggaaattaattaccacacctctctgttgacttaattctcatttagttcatacgagagatgaaattaactaccatagttgcgagttaaaatgattgattacactgattttcatgattacacagagcggataggtattatcagttagccattaacagtggcaaataaatggagataaccgcatgtcactaaagtccccggcagaaacacagattattacatggataattatcggcattttttctgcttggggaggtttagtacgatacctgatggacagacaaggcactcgcagtaaatggagttggatgggtgtgctcagccaaataacgatatcaagcttcaccggtttattaggtggattattaagttttgagagcggcgccagccattacatgacattcctattttctggattattcggcacaatgggcagcacagcgttgagctacttatggcaccgtttatctaattcgtcagggaagtaacatggcttattttatacaaaaccatgccaacagacagaactaaccaatagttagtccccaatgggtccaagttgttcactcagtattttaactttcacaaagagctactcatgacatttttactcccaactatctacagcaccggaatattattgttcgccttgcttcttatcgtacttttggttcgtcatcagcagcgaacgtctaaccaagctcaacgggataatcaacggctaaaagcgcagaatgacttattgaatgcccggttattacagctgaaaagacaggctgaagatttagcctcggctataaccaaacaagcgcagcatacaaaacagctggagaagaaaaatgcattgttacgggaacaaccgcatgtcatccaggccgaaaaggcctaagctgctcgaattaccccaacacagctatccgacaaaatgcactcccacagagtccaaataactctccgataaaacttatcccacataatctttgagagttagtccacccgtatgagattgaacgcagcaagattatccagactaaaataggcctaatatttaccccccctatactccccattaatgaataagaaaacctttcagaaatacgcctctctcactaactttattcaacgtcactgaccgcttctctcccgtcctcaagttttccctaccacagcctgaaaagaggcgcaaaagaatgcaataaatttagcgcatcagatcaagccattattatttaatcaattaaatacgttataacttataatttaataaaaaaacaaaataagttttgcattaaaatataaatatcgctgtcatcactcaaaaaatcaaacacgaatagcttagttaagataaaaatagagcattaacgatatcatcaattataacccgatattgatttcttaatcagtgatttattgaatagtcttttcgtaccaacaaattggttggtataaaaaaggataaagatatgaacaaggtaaccatcacgattaatacagaatcaaatacagttgaagtggaaaaaccaactgaaatttataaagctcaagcagcggctttaatctccgcccccctcagagcaagagtcgcagccgaagtagcgccaaactccagcaccgaggtcttctatcaaagcactcccattattccagaaagccgccgaaacataatgatcactaatgatggcgcggcaaacctcattactgccgagtattattggtcgcacagtttcactagccaatggttcctttatacgtccattgaggtgagtgtcggtgaatctaagttactgcagtcaccatcgaactctctatattacagcaaagtggtattggtaaataaaaccagccgaaaagcgtacgtaacagcagaggagaaataaaagtagcgattaattaacggattgtaaatcttctatcagaggaaaatagaaacagcctgaaaaatcttatcttcatgccagtgaagagccaggactttacataaaattctgaatttcggctcaagccggattgagactttttatggccaaaaaaaagttttaaatattcaatctgatttgaataaatcatgaaaataaaaggtaagttaaatgaataaaattacagagtatgacaatatcgccagtctgactccttaccctgtctatgctagctcggcttacgagtttgactggaattcttccgctatccttaagcaagcgataattaaaggtatatcctttattccttacgttggagattatctgtcctcaattatcgatttcttctggaaagatcaagaacgcgatatttggcaggaaatgatgggacagctgcaccagcttattgaggaaagtgtccttaaagcgattcagggtatcttattaggcgatatcgccgaacttaaaggcaagattgcatccgtagtttccgcgctacaggatcatcccggtacgccagaagccaaaagcttatatatgagtgtctccgtaaatttagacagcgtacagcgcaagttcactacctttgatcacaaaaccaattaccatattctttccatgtattcgacgactgctctgatgcaaatcatgtactggactatgggtattgagcgtaaagatgaaattggattaaacaacaatgaggttgggcaacttcagcggaacattgatcaactggtaaagcatgtcgaagattatacacagggtatttacgatacagagctagatattcagtacaacgaatcttcacccaatacagtggcaaataatgtcatgtacgcccacggttattgccgggtacatggtatggaatatacagagatcattcaaaacgttcaaaaaaatggcagtaacacgaaaggtctgtatttaaaaacgttgtgttatttcaccttctttggctggccaaccagccaggctcggattttagcgttaaaagatgaaattaatatgcctgagccattcaaacccagtctggttaatggtcgcatcaaccagattaaatcgattaaaggctatatccagcgtattggcggagctttgcgagtaggcgggttcgaaattatctttgcaaacggcaacagataccaacagggtacggttaccggtgaatcccgctcaatagaacttaatggaagcctgattaatacgctcgaaacctggggaaatggagctatcgatgaggttaaatttaccttaagcgatggccgaaccttgagtgtcggtcagcgctattcaactaactatcggaaattcgctctcgagggtcactatatttctggcatttttgtttccagcgatcgaaaagagctggccggtcaggccgcgaatatttgtgtttcttaccaccaaaaacaatagctttattaatatagagattattttcaattctatttaaaactaaaaacaaacaggaaataaaaaatgaataagatgcctatggctttattgttatctattttttgcatttcatcttatgcagctaatgatgtgagttcaatttcagagactagtgttccacctgaaaagaacatgcaaaaatcactcaataagagtgaaacctatacctatataaagtgtgcttaccggaaaaacaaagataaatcgtttgacgctacgtcatcctgggaatggggccgcgcaggcaattcagccaatgattatgccaccgttaatggccattggtattccagcgctattttagccaatatgttttatacgaaatcaactcatcaggaaatcaaagacgtttgtattaatacattaaataagaaaaatattagttttaccgaccttatcccttatgcgtcagattacacgttgtcttactactattcgttctggaatgaaggagacaaaataccgacaattgatattggtaaaactaaactggaccgaatggttgtctttggtgacagtctatcagatacgatcaatgtctataatggttcctacggaactgtgcctaacagtaatacctggtatttagggcacttctcaaatggattggtttggcatgagtatctgagccaaaaacacattaaagtgcctagctacacttgggcaacaggtaacgcggagagcggtagcggccttatcttctccggctttgggcagcagctggactcttttgagtcctatataaaaaaatctgatgggtattctatcggtaaaactctttttctggctttatttggtggcaatgatttcattacgggcagcaagtcacctgatgacatcattaataactataaaaatgatttagtccgactaaagaatctaggcgcgaagcagattgcggtatttagtctacccaacttttctactgttcctgctgttaaaggttggagtcaatctgataaagacaagttaaaaaataaatctatcgagtttaacactaagctaatctcattaatcaattcactgaaatcgacatatcctgatgttaaatggattatgccaaatctaaatacggcgtttgaggatatcatcaaaaaccctgagaaatttggctatgttaactccaaagacacctgtttgaatttgcgagattcaagtctcgattatattaccggtgcgtcaccacgagacgaatgtaagaatagtaatggcgcttttgttttctgggataatatgcatccaaccacgaaaacacacgaaaatatcagtgacattttggcgaatgaaatcaaattggcactgtaataccttacgttgtatccgataatcgtcatgcaaagtgcgcgtatatctacggctgtggatatacgctttttacggccattagttctcaccgccgttctttatcaacgttacggtttctcactgctatttttttctctactatttttctctgctactttttaaccgtcatttgtttttattagtcttgttaacaattcgttctctcagagcaaagacgcagcctaatccgccttgtattttactcaatcagcaatctattagatgaaaagcggggcgtcatttcacaatgcacatcggtcggccagaaatcggttcgcgatgaatttgcgcgtcaatctgaaaagtttccgccaagagctccggcgtcatcacctcctccggcgtaccctgaacaataactttgccctgcctcatcatcaccaaattgtcgcaataacggctagcctgattcaggtcgtgcaatactgcgaccagagtttttccctgttgattttgccgacggagcaacgccattagttcaacctgatgattaatatcgagataagttgttggttcatcgagcaataacagcggcgtctgctgcgccaataccatcgccagaaatgctcgctgacgctgccctccggaaagctcgctgaccaatttatctgccagatccgcgatctgagtatcgcgcatcgcctgctcaactttgcgtttgtcatcggcgcttaaccgcccccacagatttaaccacgggctgcggccatagccgaccagttcgcatacccgaataccttctggtgaaacgtgctgttgcggtaacaatgcgagttgacgagccagttcgcggctagataatgcggaaataggatagttatcaagccatatgctgccagatgatggcgtcagcaaacgcgaaaaacacttcaacaaagttgatttcccacatccattcgggccaagcaatgcggtaattttgcccgctggcagagtcagcgataagtcgctaagaatggtatttttaccgtagccagcgcgcaggttctcaattgagagttgcatcagcggtttctcatcaaaagccagaaaaaataaggagcgccaatcaccgcggttaatacgccggctggcagttcaaggggaggatgtagcgttctggccagtagatcggcccataggaggataagcgcccccaccaacattgccgcgggaatcagcagcaaatgacgcccaccgactagttttcgggtcaaatgaggggcgaccaacccgataaatccaatcgggccgcatacagccacgctgatagccgccagcgctactgccaatattaataccagcgattgtacgcgccgtaccgaaatgcccagcgttgacgcactattctctcccagcgccatcacgtccagatcgcgacaaaaccacaggctaagcggcaacaggatgaccagccagggagcaataaccagaacaaatgaccagcctctcccccacaaactgccggtcagccataacagcgcgttattgatttccagcggatgtgacagcatcagataatcggtcagactggcgtaaaaagcggtcagagccacgccagttagcgccagttttaacgcggcggattgacccgcgcagacgcgaagtagcataaacgccaatacgccgcccatgaaagcaatcggcggcaaccacagtaccgatagagcgggaaatagcatcaaggcgctaaccgacgccagccctgcggcatgattcacccctaaaatatccggtgacgccaatggattgcgaatcaccccctgaactaatacaccggacaatgccagcgccgcgccaaccatcattgccagcagcgcacgaggcaaacggtattcgacgagcggaaaatagttgtcgtctgccggaagaaaagccatgcgcatctggctgaaactcaaagtgtgggtgccataacgcagtgacagcaacaatgtcagcaataccaacgccggcagcagtatcaacgtgatgaatgggcgcttcatgttcggctcctgaccaaccagataaagaccggcgcaccaatcaaagccaacactgcaccggcggggatttcgcccggccacgccagcactcgcgccagtaaatccgccagtaacatcagcgtagcccccatgatcatgctgacaggcagcatacggcgtaggtcataaccgatccaacctcgcgccatatggggtatcaacaagccaataaaggccagcggcccagctacgctcacgcaggcgcccaccagcagcaataccatcagattaattaataatcgcaaacgaggaaggttcactccaagtgagtgagcgctttcatcgctgacctgcaatacattcaagcggctagcaagcagcaacgccagtggagccacgatcagcgtgaaggggaataaatgccaaaactccggccagcgcgcatgagcaacgccaccggctagccagttgagtatgctgtaggcctgatcttcagacaaaatcagcgttgctttggccagagcagcacatagtgccgataccgcaacgcccgccagaaccagccggctacggtcacctgcctgctgccagccgccgccaagtagcataacaacgccccagctgatacctccacctaaggcggcagccaaagcaatgctaaagccagaaaacagctgcgggctaagagcgctaaccactaccatcgccagcgaggctccggcattaatccccaataatgagggggaagccagcgggttgcgggtcagcgtttgcagcagactacccgccagagccagactggcacccaacagcatggcgaccagactgcgcggcaagcggagattcagcaccaaagcctgcgccaaggttgccggcgcacccggaaacaaagcgcgcagcgcctctaacggcgcaatcggcacggccgagcggcaaaacaacgtgagccagaaaccaagcgctaataccaacagtggcaatgcccagcgccacccgataaaaaggcgttttattagcataataacattgcgatcatggcgtttcgtttcttgaccgatgatgcaaaatggccacggcgtcactggcgatatgctctgcggcaaaaaccccgcgcatacgcgcccaggtattgctatctaccgcagcaacatgattttgctgtgccgctttcatcacctgccacagcggatctttctgccactgtcttacaatactttcctgacgataatgcgcgacgatcagccattctggatcgatcgctaatagctgttcgagactaatattggcgagcgcctgcttattcacgggttcaggcacgatcaggcccaaagcggtcaaaacgctgccagtgtaagattcacggctgtgcagattgaactgctgttcgcgggaagtaccgaataccactttttcaccttccggcaactggccggcaaaagcctgcatacgttgatgatgttcggccaagcgcggctgcattaaggcatttttccccaacacttcaccgattatcgccgctgattccagattttcactgtaggtttcattgcgagacttaagcatcagcgtcggcgcaatgccttttaacgcagcataaataccaccgtggcggctgctgtccgcgatgattaaatccggttttaaagccgcaatagcttccagactcggctgtgaacgtgttccaaccgactgccacggctgaatgcgctggcgtacctccggcaatattctttcgggatcgttatcgtccgctacgcctaccgggctaacttcaactaaggctaaagcgtccacaaatgacaattccaaaaccacaacccgggaagccatgccattgaaagtaaaagcgccctgctgatcctgcaccgtcacagctccggcgttgcctagacataaacacatcagacacacgggaatggccaatcgtgagataaaagacatagaacctctggcagaaaaagtaaaaattaccgggcatcctatagagacacccggcatagcagcgatgctgaaatattagaatttcaccgaaccttgcagataaagggtacgcggctggccgacatacattcctttgttgttatcgtcataggcgcgggtgaagtaatggtgatcgaagatattcttcacgcccaccgccagattcaggttggccatttgcgggccaaagttgtaattggcgcgagcgccccacagcatgaatccaggaattcgcccgttactgccgtccacgctttctttcacagtattggcattgtccgcaaactggctggactggaactcgctatttaggttaaacgtccaactacccggtgaataatccagccccagcgtgcctttgtttttaggtgagaacggcacctgattaccgcggttagcaccttcttcacggattatcgcattcacataggcatagctggcgtaggccgaaaggttatccaatgcgggagataaatccgccagatcgtagcgcacctgactttccaaaccgctgtggcgggttttaccgcgagcggtcacgctatcagtcacctgattggaatcatactgattatcaaagttaatcaggaacagtccgacttccgctttcacgatgtcgttatcgaagcgcgtccccaattcccatgtgcgcgctttttccggctcaattttgccgctatccacggcttttccgatttggctgtactgcaccgtaccgaaggaaccttcggtattagcatagatattccaggcatcattcaggtgataaaccacattcagagcgggcagaggcgcgttgtagctgatgtcctgcttagtattcttaatgtagttattctgataagactgaatacgctcatagcgtatccccggcgtaatcgtccaatcaccaatatcaatacggtcatcgatataccaggcgtgagcctgagttccggactgagtatcccggtcaaacgggctgctggtagtcggtaattttccactgctggctaaactggtgtagcgcaattcatgggttgattcgctaacgaaacgatagccgatacccacttcatgggcggacgagcccaatgtgaagctttggctataacgcggttcaataccacgaacccaatattcgcgcggtgacagggtgatatttttgccctgattgagatagccactgcgtaaggtgtaggtatagaagctctggatattaaacttatgctgttgatccggttgatattggtaacccagactcgcgagctggcgacggccccagaattcgtcgtaaggacgcgttgactggaaagggtcggcgttataagccgcacgtgacaaaccgcccggcatttcagcccgaccttcataatattgcagtaagctattgaaagtatgtacatcgtttggcgcatagcgcgttttcaacatcacatcgtcgattttggtggaactgtgttctcgccagtcgctaccgcgagtgccagaatacagcagcgccgctcccagaccgttatccgccgtgccgccaatcatcagatttccggtgcctttgggatcattctggctcgatgtcgggctcagtgcgccttccatgcccgctgagaggccaaaatcctgcggaatagcgcgagtcacgaagttaaccacgccgccaacgctttgcggcccgtaacgcacggcaccgccgccgcgcaccacatcgaccgcatccagattacccagcgaaaccggtgcaagggaaagctgaggctggccgtaaggggcaaaaggaacgggaataccgtccatcagcacggtagaacgactggctaaacgcggattaaggccacgaataccgaagttcatcgccatatcatggctgccagtgccattgttttccggcgcattcacccccggcatacggtttaaaacctcacgaacggtagtcgcacccgttttagcaaactctgcgcggcgcacgacatcacgcgccccggcgtgttcaaaaatgtcattttcacgcgcatcccctaaccaatcaccgactacggtcagagtatctgcgttagctgagacctcaggctccagcgtgaaagcattgccgcccagcgctttactccgtaaaccactacccgataacaaagcgtgtaaaccgctattcaccgaataattgccgtttaggccttcgctacgtttgccgcgagtcagtgaggaatccactgacaaagtgatctcagactgactggcaaacagattcaatgcggtatcgagatcacccggtgcaatgtgatagctcgcggtggcagaagccgccgtcgccattaccggtgccagcatcgccgctggaattaacgtgcaatgaatggcgattgccaatggtgttgccttgctaaaaatgccaaaaacgcctgcgcgtgaagaaatggacataccctctccagaatttatgtttttttactgtgctatgtaggagtcgaatgaaatcgcaaaaggtataatcgcgaatgcgactttttatcatttttatttagaaataagcattcaggcaggcaccactttcacccaatatcgggtaagtgattgaactttaacaggaagagtttgagtcagtatttttagcaaacgatcggtatccttgagaggaaaagtgccgctaatacgcagctcggcaaccgtcggatcgcagcttaggcggccatgtcgataacgcgcaatgtcttcaatgacatcacccagccgcccgtcactgacgcttaatcgcccctgagtccaacttccggcaccggcgattaacggagtcaaggcagagaaatcccgatcgctgaaactcaccgactgaccttcattcacggtgataatttgatttggagcggcgcgtagcttcacttcgacggcgtgtttaagcaccgataactgtgtgatatctccggtttgtcgcacgataaattgtgtacccaacgcccgcatccagccctgcgatgtttccacaataaaaggtcgagcctgcagatcttttgcagtggtaatgccgatctctccctgatgtagccagatcagccgccgatccgtcgtataacgaatgtctgccgcactggcggtattgaggaaaagttgggaaccatcgctcaaaggcagagatttaatttcaccggtcgaggtgcgcgcatctgcccacagcccttgcccggtaggcgactgccaggctttccaggaaccaccgactcccagaaaaaccaccaatcctttcaatacccgacgccgagtgatttccgcctgctgtcgtgcctgattgagggtttgatagctgaatgtaccgggcatgctgtgaaactgcccctgtaatgcctcgacccgctgccacgcccagcgatgatcctcatgctgctgataccaaagttgccacttttgcttttgctgcgacgtgacgttttcgtcacaaagggcagcaaaccactgcgcagccattttcaaggcccgttgctgagattcagataatgaggaactcatggcgtttgaggatgttccagtgcaaacagcaggcaatgttcggtcgcttttgccatatattttttgactgaaataaccgatatctgtaaacgttcggctatcaccggataagtgagcccttccaactgcgacatcagaaatgcctggcgcaccttatgcccaagcccatcaagcatggtgtcgatttgttgcagcgtttccaacaggcactggcgctgttcaggtgaggtgacagaaacttccggcatttgcgccagcatttcaagataggcacgttccagcgcgttacggcggaaatagtcgatcatgacccggcgagcaacggtgcataagaaggatttgggttcacgaatttcatgagctttattgccgacgagaatccccataaaggtatcctgcgccagatcgtctgcatcatatgtcgatcccagcttcgatcgcagccaatttcttaaccagtgatggtgcgagctgtagagagcttcaaagctagcagaaggtgacgcaccagcgagagtggacatagacggttacaaaaccctaccgagaatttattcaaggataataattgataatagttatcattacaatcgagaatcaaatgctattttatttcctcctttttaatcaatttgttagcgttatactcgcaggttctggctagagataaatttaaacgctttattggcgtgagtttacatgaatatgatcagcgtcaatcagagaattccgcgtcggtatcggggcgttctttaaaagagatccgatataactcatgccattacattaaatataaggataaggataaagataaagataaagataaagataaagataaagataaagataaagataaagatacagatacagatacagatacagatacagatacagatacagatacagatacagatacagatacagatacagatacagatacagatacagatacagaattaaagttttcgtcagtctatttaagaaaaccagccttgcggctggctattttatctctggaatgtatttatcccgcgactttagcgactctagcttgatgtttaagaatatcccgtgctgaatcagccataatcataatcgcacctgccagcatcaaagtatcctttaatatcaatcgtcctgcccctgataaataagggaaaccgtggtgcatgtctcccaaattcggaacccaggcttctggcgttgtgattaaaaatgaaagggtaacaaaaggcgtcaggaacgctagcaggccgccaatcaggcctagccaacggctaaacggattggctaagaccaaaagagcaatcagcacttccacaacacccagtccattagaaaaatcgtaggtgttattcatttcttgccactgtctggcgacaaggtttaactcaccttcgtgcgtcatatactgtttatattcggtgggattctcatagaagaatgacatcaacgggctattggcgacaaaaggggtaatactatcggcttcgtaaggtacaaatttcaacaaaccgatccagataaaaacaatcgcaatgcttaatcggatcagggtaagaccgaccttatcaccccgactcagtaactctaaatacttgttcatcgataaactcctttttatttatctgacacagcagtagaaaaccgggttaattagataaacacccgtctttccattgatgagataataggtttatctgagtgagttgcatttttcacagactctgaatttttttgtcgtatcgtctgaaatagcgtgactacccataatcgataaaacaactctccgtccgaaatagagcgttgtaataaagcagaatacttttattgaaccagactgaataaatcgtttaaagattcactcatcgaaggatgagtaaaaatctgatcgcgtagtatggtataaggcagccccgcatccattaccatttttacggtattgatcatttcgtgagaatcagggcaaagcaacgatacaccgagaatctgctgtgtcttattatcaataatcgcttttagcacgcctctcgtatcatttaacactcgagctttcggaatagcagcgaccggcagggtaacaacctgaatatcggcaccgctattgcgcgcttgcgtttcggttagcccaacccgagacagcggcggattcatgaataccgaataaggtacatgtttacgatcgccggtatggcgtttaccactccccaatagctgatcccgaacaatgcggaaatcatccagcgaaatataggtaaactgcggcccaccttttacatcccccatcgcccagatatgactcgccgtggtacgtaaataaggatcgaccatcacagcaccgcgatcgttaacctcaactcccgcctgatgcaattgtaaatcttgagtattcggcgctcgcccggacgcaaccagtaaggcatttacgttatagtcaccttgatcggtatgcagctgaactgcgccattatattcagatacgcaatcgaccttggcattgagcaccagttcaacgccctgatctttcaaaatacccagaatcgcccctgctacatcctgatcttcatgaggtaaaaagcgcgatgccgtttcgaaaatagtcactttactaccaaactgagcaaagattgaggcaaactccacgccaatatacccgccgccaagaatgcccaaatgaacgggcaaagtttccagattcagcaggccggtactgtcataaacccccggcgttgatgctaaaccttccaccggtggcattaccgacttcgctccggtattgataaagatcttttcaccggtgagcgttaattccccttccggcgttgtgactcgtagcgtatggctatcaataaattccgcacgcccatcaataacatcaacattctccaaatccgccagattgtgataattcttatcccgcaggaaattaaccagatcggatttacgacgcatagcctgagaaaagtcataatggagttgcgcatcatgaaccaaagctttagttgggatacagccaatattaatgcaggtaccgccatacattttctttgactgctcaataatggcaacttgccagccggctttagccagggttacagccagagttttcccgcctttcccaaacccgactatgacagcttgataatgattcatgattcatcctcgccaagaatttctaatccaaacctgagaaaaataacgcccctaaaaatcccagaacgatttcgataggtcatagtgtagctataacgactgtgctaacgtatttccatcacgcttgataaattgttctggagtctaatttggatacccttagcaggctgatcgctcttaatcccccgcggggccgccttgaccgtaattgtattctggatggtgactggcaattacctcacgccgcaggtgacttatccgtcattcgctggcatgtggtcattaccggttcggcttggcttgatttatcttccggcgagtcccgcctgctggaaaataccaccatgctgctgttaccccaaagctccgcccatcgcctgcgacagcatacaaaagaaaatacccagattttatgcggtagtatgaatatgcccattagcgctcgccattttctgaccgcgctgccagaggtattggtgctgtcccctgagaatgcctcagtaagtcgggagtggttccactacgctatcaaactgatgcaggaagaggtgaatcgcggccagcccggtgccgaagcgatttgcagccaaatgtgcgggatgtttttaacctttgcgatacgtggttggctacaacattctccactggataaagggctactgcaggctttgctacatacccgattaggtgaagcggtggctcaaatgctggaagctcctcattatcactggacggtggaaagcctggcgcaaatcgcccatatgtctcgggctagttttgccgaagtgtttcgtcaggtctcagggacaactccgctttcattgttgacgactctgagaatgcagcttgccgcacagcgtctggctcgcgaagccgcgcctttggtagctatcgcagaactggtgggctatgccaacgaatcatctttccacaaagcttttgtgcgccattttggctgtacgccggggcaataccgtaacaaagctaaagaattggcgacacatagcggagactagagggttggccataaactgcctgttttaaacagaaacgcaactcatcgtttattcgctgtgcgtttattgacgacgaactgagtaaccattcgtttattcaccgccagtgtggtggcaacgctccgatcgccagcacattatcattcccttttatcctattgcacccggcttaatgggtaaccctcaattttaatcccaatgttatttttttgaataagattcatataaactgaatgcctttctctatcagtcgaactgaaatgtgattatcaagctgcaaagacttacaaaaacgcgtcgaattatcgaagcgaatgtacattctctttttgataaatgccatgtgttctatcttctatcttctatcttctatcttctatcttctatcttctatcttctatcttctatcttctatcttctatcttattatcgtcgacattatatatcttagctaattccttattggtgcagcgttgtagcataagaaaaaaataatatccctgcacgtttaacaagtcattttatacctcgctaaggcaccatcagggaaacctcatttacgttagaaagcgcctttggaagagcaagattaattgccataggggagctaataatacaagtagatataccgacagccagaacttactactcttaaccggtttttactttccagttgattatttatcgcccgatttaatcagaacgactaaatataaccgcgcacctgctgataataaaatgcctaaatcaggaaataaaaaagtcagccactatataggctgactttttaacagacttttatgattaatttatatcgggatgctgggcgataagattctttctttttttctccagctcagcaatttcctgatcgatatcctcaatactttgctcaatattatcatggtgttcttgcaggatttccttagcttctgcccggtcggaagctgccggcgtagcgcctttcagcggtttattcgccgtttccttcataaatatccctgtaaccaaacctataaccgcaaccaccatcaaataataggctggcatgaagagattctgagtggattcaaccagccatgcggcaatggttggagtcaacccggcaatcattaccgatatattaaaagcgatggccaatgcactgtaacgaatatgcgtagggaacatggcaggtaaagttgaagccattacgccgataaagcagttcaacaatacggccagaatcaacaatccacagaatatcaggccaatcacgccgctgttaatcaggatgaagcatggaatggccaaaacaaaaaggccaatacttccgcatacgataaaaggtttgcggccaaatctgtcgctcatcaatcccataattggctggacaaacaacatacccaacatgatggcgatgatgattagtacaccgtgatcttccgaataatgcaggctatgagacaagtagctcggcatataggtcaacagcatgtagtaagtgacgttagtagcaataaccataccaacgcatatgatcagatttttccattgcttcgttagaatttcgcggaaagaaacctttggcggttgagtaatattattgcgcgcatcgctatccatttgctcaacatgctgttggaaggttggcgtttcttccaaagcgtggcgcagataaataccaatcaatcctagcggagctgcaataaagaaaggaatacgccatccccattcaaggaaattagcttcaccgacaatgctggaaatcagaacaaccactccggcgcctaaaataaaaccggcaatggaaccaaaatctaaccaactcgcgaggaaaccgcgctttctatccggagaatattcagcaacaaaaatagccgcgccggtatattcacccccgacggaaaagccttgggccaatttagccaataacagtagtatcggtgcccaaatcccgattgatgcataggacggaattaagccaatacagaaggtactgacagacataataataatggtgacggacaaaactttttgccgtccaaacttatcgccgagggcaccaaagaatatgccgccaagtgggcgaaccaaaaaaggtacggaaaaggtcgccaatgcggcgatcatttgaattccgggatcggctccagggaaaaatacttgccccagtgcgaaggcgacaaaaccgtaaacaccaaaatcaaaccattccatagcattgcctaatgcagccgcggtaattgcttttttcagtttggtgtcatcaatgatagtgatatcattgatttgcataggttttacctttcttttgcgtaatcccattatttactcccttgtattcatcttcattccactgtgtaaagccagaaagagttaattgctttagcagccatcaaaaaaatttatgtaactatataagtaataacctatgtaattacgtgatgcaatgaagaatcaggtggaaatacgggctgaatggctatttttactgacaaaaactgacgaaatttttatgaaaaaaaaccttatttttctcaatgttactgatattttttcctttagaacttacagggttagcgaaaattgacaaaaaatgacgaagacttaaagctcacgaagaaaaggacgaaatcatcgacgcgttcaaaaaaaataataaatttcctttgacagagcaaatgactgttcttgcggaataaataacctaacgaattattttgatacattctcgttagccgaagcaaccatagataaatagtggctaataattatctgattagccataaataaggcaatgacgctttagtagaatggcgaggccctttatttattgtttcccttccttttttagcagcgctctcttgcgctcaacaccccaacggtagccagacaacgcgccatcctgacgaacgacccgatggcaaggaatcgccacagccagcatattggcggcacaggctccggcaacggcgcgcaccgcctttggtaaaccaattttatcggcaatttcgctataacttgccgtggcacctaacgggatttctcgcagagcttgccagacccgctgctgaaaagctgttccgcgaatatccaatggtaaatccaggccaatttctggcgtttcaatacaccccaccacctgagccaccaggatgtcaaaagcttcatccccgccgattaaaaccgcctgaggaaacttatcttgcagctcttgcactagctgttgcgcactctctcccatccaaatcgcgcaaattccccgttcacttttcgccactagaatatcgcccaatgaacactggccaacggcaaaataaatagttgttccggttccaccgcgatggaatgccttaggcgtcatgcctaacatggcattagatttatggtagaaacgtgcattcgattgatagcccgcttcgaaaatagcgtcggtaacaaaacccgtttgcgccaattgctgacgtatccgctgagtacgcaaagcttcagcgtagccttttggcgtcaggccaatcgccgctttaaatcgtcggtgaaaatgatatgcgctctggcccacataatcagcaagttcatttagcgttggaatatgatcggacttttcaatatagcggcaggctttggaaattatttcgtactgctgatctccctgaacaccgccgcaacgtttacacgggcgaaatcctgctacttcagccgctaacctattcgcgaaaaacaccacgttttcctgccggggctgacgggatgggcaagacggtaagcaataaataccggtggtttttaccccatatataaaagcgccatcggcgtctttatttcgctggacgatagccagccaacgcgcccgatcgctcttgaaattctgtctagcattcataatcgttaaccctcgacgaatggaatcgttaaggcgttgccgtttaaaatttcggtcccgccagtgctagccagattaattcagagaaaacggtcaaacactccgcttcttgctttttcattcgagcttcgggtgaaaagactttaatattccccccccccccccgcgagcggaattatttttcactcatctttggataaagcccaaagatacaaagaagcggtggtgccatagggtgaataacgtgttctataacgtttaaagcgctctttagtcagttctttatgacgatataaattcatcataccgcgccgaatagccaaatccccccaactcacaacatctggacgcgccagcgaagaaattagcagcatttctgcggtccatacgccaataccatttaatctggaaagagtgcgaatgatttcgtcatcgctttggctatgaatatttgtcaaatccagctctccgacccgcaccgactctgctgcccctttaatatattgggcttttttcattgtcataccacagcgctgtatttcttcatcaggcaataacagaatgcgttcaggcgtaatatttccgactaatatctgcaagcgcgtattaacggtttgcgccgcttttaccgatatttgttgttcaacaatatattgcactaacccggcaaacagatcgggattggttggacgttgtaacatgccaaagcgttcaatggccgcagccatctttttatcgcgttttttgagatgctgaatctcagtttcgccataaacaaaaaacatgcccgcccctcagtgaattgccttcgctacgaatatccttcattgatactgtatttttatcatgatgaatagagccaatctggaaaatattgacgctaaacgagataggattttatttatcggcccaatgaggttcacgccagagtagttttcgctgccagtctcggcaaacgcttttcatccagcttaccatttggcgtgagcggcatttcactgagcaaatgtagctgactgggaatcagatattccggcagcctgtgcgccaaatcacagagaatacgacaaggctccggcgcgcaggccggataacactgacatagggtcgcaaatgccaacagtttttcctcagcacccaatcgttgaacgaccactttgacctgctttaataacgggcacacgcggatcaactgcgattccacttcggcaatatcgatcagataaccgccgattcgtacctcttcctctatacgccctagaaattgataatgcccgcaaggcagttttctgaacttatcgccggtacggtataagcgtaacctttggcccggtattggctgccactcgataaatcgctgggcagtaagctgcggttggttgagataccctcgcgccagcccgaggccagagagataaagctctccggcttcccccggcaggcattcggcaccgtcacggtccaaaatccaagcctgaatcccagtaaccggttgaccaacatgaacgcgctggccgaggaaaatccgcccataaagagcggttaccgtacattccgccgggccgtacagattataaagcgctacgcgatctgcccagcgatccgccagattttgtgggcaatcttcacccccgatggcaatcagcgacggtaaccctgcagcctgaatatcaagacgagctaacaatgcggtaggtagaaataagtggctgctgcggctgtggacaatagccgcggtttccccgcagccaagagccaattctcctccgcagattaacggcaacaaagcggccatattacccgcgtcaaatgccagagataaggcgttatacacccggctgttggcggtgattcctagccctttagcatgatctttcaataaattagccaaagcgccatgttcgatcattacccctttcggcacgcctgtggaaccggaggtatagataattaaagccaactgctggggacgacgaacgacctgcggcggttggctgcccgaccaacgttgaataccgcgaagaaatccggaagaggttatatcgaaatagcgggcgcaggaccaaagcgccattgaatcaccgctgccaacgccaagaatcacgctcagcccagcgtcggcgaccatatggctaagtcgtccaagcgggtaatccatatccagcggcacgtagcaggctcctgctttccacaccgccagcagtgccaccagaaaatagggatcgctaccggtaagtacgccgatccttgagtgctcacctattccctgttgattcagccagttggcaatacgattagcatctctttccagctgaaaatagctgatgatcccctgttgcgcattccttgccgcaatgcgatctggcgttaaccgactccagacctcgatcaggtcagtgaccgtttcttccatcggataatccatcaggccgccagagttgcgccaccatccacgacaatatcctgcaacgtaatatggctagctaaatctgaagccaagaacgcgaccgtttgagcaatttccgcaggcgtagcgattttccccagcgggattccgagcttgtactgctgaggaaaaccggcgatggtgcgttgctcggcgtctggcgtttgccacattccgcgttgcattggggtatcggtcgatcccggcgaaaccagattgcagcgcacgccatagggagctaactccagcccaacgcaatggctgaaactggttaatgcggctttagaggcacagtaagcggccatttgcatacgcggtacatgagccgcatttgagccaatgctgactatcgcgccggaccgctgctgcttgaacaccggaataagctgttttaacagataaaaagcaccagaaacgttgacgtcaaaacactgctgccagtcatccaaactcaagctttgggcttctcccatacgcaaaatacccgctgcgttcaccaacacatcgatgccggacgcaacctcaagcagttgctcgcaaacgtccgccacctgcgcaggctgcctaatatccagcactgccgtagtgaaaggatatttttcattgggaaagtttttatccaggccaaagacttccgcgcccagcgccgtgaataatttagccgtttcaaaaccgataccctgacccgcaccggtcacccacacacgcttaccggtgaaatccatttgtaccattgtgccagccattatttcgccccagccgccagttgtttctcaaacagtgcccaccagccatttaagcttggggatttcgccagatcgacaaaactcagctcaataccttgctgacgccattcggtcaccagcgccatgatatgaacggaattcaggccgtaatcgatcagattttcatcttcatcaaagtcttcgtcactttcgtcaatcagcgtcaggagctgtgctttcaagctttctttgctgaatctgttatcactttggtttgcttcacccagcagtgcctcagtgaaaatcacacttccgctacgcgtcgccacatatttcagcgccatcagatgctcttccagcgagaaatcagccaccgcgtccgccaccataaacggcttaatatctttcatgaaagcgtccgttgcagtaatcatgcagccaatgtggccgtagataccgcaaatcaccaactggtcacgccccatttccttcatcatttgttctaacggcgagcgatggaatgcgctatagcgccatttcaccaaaatctcgtcgtcttcttccggcgttaacgcactcactacccgctgcttggccggatgatcgtttaaacctgcgccccacatgtcattcagcagcgcccgatcttccgggctttgattattaggttgagcggtataaatcaccggcacaccctgacttttacagtagcggcgaatggcggcaatattgtcgatcacccgattaatcattgggttattgtcaccgtagaagctgacaaagtagtcctgcatatcgtgaatcagcagcacggctttggtcggatcgaactgccagcccactttatttgccggaacatgttctgcctgcggcagttgataagcagaaagagttggaatcgccatgaaaaaatccttattcactgatgctgatttgggtctgaatggtttgtcgcagtagtcgcttgtctatcttcccgaccggcgtaaccggtaggctatcgaccatttcaaatcgatccggcagcttgaattccgccaccccgataccacgcagatatttgcgtaagtggagcggtttgagactggcatcgcgagttaccacaaaggcacagcttttttcacccagcatttcatcaggcatcgacaccagcgccgcgtgaatgatgctttcgtgggttaacagcagattttctacctcttcggcggcaattttttcgcccccgcgattgatttgatccttctcacgcccaacaacgcacaggtagccgtcttcggtcatctgtactacatcgccagagtggtaaaatccttcatcatcaaaagctttcgcattatgttctgggctacggtaatagccgcggaaagtataaggcccgcgcgtgactaactctcccgcttctcccggcgcaaccggctgaccggcactgtccagcaccctaacttcatcatcggcgctgatagggcaaccctgcgtggtgaaaatacgctcgtcgctatcgtccaaacgggtgtaattcaccaagccttcggccattcccagcacttgttgcaactgacagcccagcatctgcggaatgcgccgtgccagcgattcactcagtttggagccgccgacctgcaacagtttcaagctagcgagatcctctgtgccaaaatgctcggcggcctgcagccacagagatacagctggcggaactaatgaggtcatggtgatttgatgacgtttaatcagtggaaagcagctcatagcgctaggctcaggagccaaaactacgcagccaccgccatagaaaatacccaatgcgccgggcgagctgagcggatagttatgagccgcaggcagcgcgcacagatagcgggtattttcatcgttttgacaaatatctacgctgcctctgacgctgtagtaataatcattgtgagttcgcggaatcagtttcggcgtcccggtactgccaccggaaagctggaaaaaggcgacttcgtccgccgcagtcggcgaaaaatcaggcaactcgccgtctaattcctcatacagcatggtctgtaacaatggcgcataatcattctcaccatcaataatcacaaattcaagagaaggcactgactgctgcaactgctgcgtaaaggccgcgtcactaaacaaagcgtggctggcggaggcaatcaacaggcgcggctgaatttgtttagcgtaagcattcagctccaaccgattgtggctaaataaggcatttaccggtaccacgccaattttcaacagcgcgaaatacactaaataaaactcggcgacattgggtaattgcaccaaagccgtatcgccatgtcccagtccctgaccggttaatctggcggccagtcgatccgaagcgcgattcatttcggcatagctgaactggcgttcgccgcaaatcaccgccgttgcctgtggacgcagttggcactgtctggacagcacgtccgtcagcggtaaatcaatccaataacctttttcgcgatattgacgtgcaaactccgcaggccaacgggtaaattcaatactcatggcaaacgtccctgtgattgaattcccaacgcattcaacatggtgcctagcttggcttcggtttcggcccattcaagtgcaggctgcgatgccatcacgattccggccccagcaaacaggcgcgcctgagtgtcatgcagcgttgcgcagcgaatcgctaccgcccactccccgttgccgtcttcatcacaccagccgacgataccgctgaataagcctcgttcgaaaggctctaactgattgattaaccgacgagctgattccgttgggaacccgcagagcgctggcgttggatgtaataggcaagccagttccagcaccgaggtttgggcactttccagctcgccgctaatagctgtagaaagatgccacagtgcagcggtgctaatcagtgaaggctgcgtcgggatatttaacgagcggcaatacggcgtcagtaagcggcgaatttcgtcgataaccaaacgatgctcatactgatcctttccagaattcattaaggcttgagaaaccacatgatcgccttctaccgttgcctgacgttttgccgaaccggctaaggggttggtgtaaactcgatctccgtccttacgtaccagaagttccgggctggctcccaacaaaacgccgccttcactcagaggaatatggaaatgaaacgcgcctggattttggcgtaataagtgattgataacccggttaggattgatcggtgtctcggtttcaatctctaaaattcgcgacaataccaccttatgcattgcgccccgacggaaggtttcaaccgcctgagcaaccgcctgtttaaagtcgtcttcattaggcaggctgcgccactgagcgacagaaaccgggtcttctgatgtatctgatgcagcagaaaccaattcctgacggtcgagaaattgataggattgaggaatgaatagctgggtaggctggctaatatcaaagggaatggctccgacaacgataggacgttgcaggccatcggcgcgcgctttgataaatgccttctggatcgattcttgcagcgtaccggggtattccgcaccgccttgtgctcgttgagtaattcgttccgccaccccctgtgtttttatactccgatgtgctgaagtgaataaaaacgctgaggaagtcgctgaaaaaagtgagttatccaaacgccctgcagtgccactgtgtgccacaaaaacctccaccacgatgtaaatagtaatgttaataataattactatcattcctctttaggcgtgataaattacgacgaagcagtgacattgtcaatgtatgtaaatattccattaattattttttcttatatggacaagtcaggaaaataggagattcaactaagccatgtcccttttttttcgtagcattacgcagaaaacccgccgcgtagcctttccggcctttttatgcctgctggctcttttgggcttgagtggatgtaaaccggcggatgaaacgcccaggatttcccctacgcccccagccagcgaaaccaatggtcaatggccccgcacggttcataccgccagaggcgatgtgcagcttgagaaagcaccgcgacgcattgtttctacaagcattacgattactggtactttgctggcaatcaaagcgccggtgattggtactggcgcaaccgttcctaacaccacggttgctgacgatctcggcttctttacgcaatggtcaaaagaggccaaagcgcgcaatctggtacctatgtaccaaacagagccgaatgcagaagcggtggccggtatgaatccggatttgattatcatttcagctaccggcggcgattcggccttgaagttgtacgagcagctttcagccattgctccaactctggtaatgaattacgacgataaaagctggcaggaactggcgctaacgctgggtcaggcaaccggccacgaagccgatgcagagcaagtaattagcgactttgccaaacgtctggatcaggtaaaaaacagtattacgctaccgccgcaaccggtttcagcctttgtgtatcaggctggagggcagaccgccaacctgtggacggcaaactcggcgcagggaaaattattattggagctgggctttacgctagccactgtccctgaatccgtactgggtaataccagtatgggacatcgtaaagatatcattcagttaggcggagaaaagctagcggaagggctgaccggcaacaccttcctgctattttctggcgacaggcctgcgattgaggcgttggaagcgaataagtttctctcccacctagcgccactccagcagaaccgcgtttatgcgatgggcaacgatactttccgcctggattattacagcgccagcaatatgttgcagcgaattgaggggctgtttaagaaggattaggtttgattttgatcttaagagcgtatttaagctactgaaggttggaattgggttcagtttcgtaagcccagcagttcactgtctcctcacttgccgtggaggcttccgagcagggttggcgcgaaagtggggttctgcgaacgtccctcgggcgcgcttgtcaggcaagccagcgctagattcgcctgcgggcgttatcaggatgccatgccatcctggccctgcggctcaaggcgcgctttcaacagctgacggctgttcactcttggcctcatccctgctcggcccacttcctgattgcgcctgttgagtgcaaaaccagtgttcttacgaatcacaatttgcctttcgtttttgatagggcttttgaccttgagtttgatttttcagagcacatttgagcggctgagacgatgagtgagggaacccacttagtgggcaggcgatacgtgcggaggcgcggattgttaaggctcgcgcttacgagccttaactcgattgaggctgttgaggtgagatattcaccaatcgaataccaaccccttgcccccgccccgcggccgctatcacaaggtaagcaaacaaaaattaattctctttcgtttcctctacactcatcttcacgtcctcttgctcagcactccccatcgaagcctgacgcaaaggctggacgcaaaccgcaataaccgcccctaaacccgcagcagcgaccccataggacaacgcagctaaagccggtgtcatcaaacgcgccagcaaacctaatcccaatgcgcccaaagactcaccggtaacaaactgcacattccacagactattaactcgccccagtaatgcgtccggtgtatgactttgaaccaaagtatattgcagcaatccgctgatcgaacccagatagccatacaacagcagccccggtaatgccagatagaaattattagtcaaacccagcgttgcgatagataaaaatgccgctatagacgcatacatcaacaccaaaccgggacggcgaacctccgcgacccaaccgctagtaaaggctccgatagtcgcccctaacggcactaccgaatacataatcccaatctgcgaggcaccaacgtgataagtattttcagccagcgcagggaacagcacgcgaatcgctccgaccatgcttaccaatgtccccaacaacacgaccgagccaaccactttattgctcaatacgaaggaaataccgctggccaaagcacgcagcgggtgttcatgctgcgtcaccgtcggtttcatctgcggtaaacgcaacagcggcagcagcgtcagcatcgtacccgtagccgcaataccgtagttccaacccactccgccgtaaacaataatcagaccgccaatagccggtgaaagaattgaccccaaacgcacggtcagcatactcaaaccgcccgccgccgccagattttcacgtccaaccagcgatggcgtagccgccattaacgccgtcatgcccaaagcgccgaaaaaaccgtcccaagttgccagcacgtacagcacccacagtgaaggcgtggcggcaaaagcgtttatactcagaccaacaaaacccaaaccgcaggtaaaacgagcgaataaaatcaaacgacgtcgatcgagacgatcggccaatacaccgcccaacagcagaccaataaacatgcccaagccatctaacgtgacggctaaccctacctgcagggtggatccggtcatcgcctggatttgtaccggcaccgcaacggtaagcatccccaagcctaatactgagatcaggcgagcaataaataccgcccgaaaatttgcattgttctttaacaggctgaaatccagaagaatgggtgactttgccatgattatctaatccattaatgtcgacagaaatgctgccggacatggccctattgaccgaaaaaagtgtattgtcacgcggatactcgcagaattttgctgatgtaatccaataatgactcgtgctaacatagcgcaaacaaataataatgataatcaaaacgataacaataatcattttattaaagaagaatcgttatgtcccttgataagacactcaacatacccgttgcggctagccaatcgggccgcttctctaacgaccgtcgtcgtgtattcggtttatttctttgcctcactctactgctgattatcatggcctgtagcctgatgttcggtgccaaagccattcctctagacgtggtatggcgcagcttgctgggggaacacagtgggcaagacagtaccctgattttggaatcccgtttacctcgcacgttgattggcgtattggccggagcggctttggggctttcgggcgcaattattcaggcactgactcgcaacccgctggccgatcctggtattctcggcgtcaatgccggagccagttttgccgttattatcggcattaccgtttttggggctaacgccatcagcggctatatgatttttgcgtttgtcggtgcaatgcttaccacgctattggtttattgggtcggaaccttgggagccggcggtgtgaatccgttgcgcctgactttatctggcgtcgctattggcgcggttctcaccggaatttcctccggcatctctctgactcaccccacggtttacgacagcgtccgattctggcaagcaggctcgctggatattcgcaatatgtcagtggttaccgcagtcacgttgccgatcgtagtcggcaccttaatcagtctattgctggcgcgtccgttgaacgccatgcatatgggagaagatctggcggcagctttaggtgcgcatattggccgtactcaattctggtcagtcgttgccgtaactctgctgtgcggcgcagctaccgcagccgtcggccctatcgcctttgttggcctgatggtgccgcatatcgcccgttggttggtcggccccaatcaatgctggattctgccttttacgctggtgatgacgcctatcttgctgctgttctccgatattgtcggccgttttctggttcctggtgagctgcgagtttccatcgttaccgcctttatcggcgcgccgctgttaataggattagtacgccgtaacgcaaggatgaccgccctgtgaaatcaatcactcaaccttggattattggccacagtgacggccggataaatctgcgcgtgcgtccacgcagtttgttgacctgcgccctgttgctgctggcctgcctgatattgggcgcgctagcgttaactttcggcacgctaaaactctcgaccaatcaggtggttagcgctctgtttggtcaggccaacggttatatcaataccatcgtcattcagtggcggctaccgcgagcggttatggcgctaattttcggagcagcgctaggcatcagcggcgctttgttccaatcgatgatccgcaaccctttgggtagccctgatattattggttttaactccggtgcttatactggcgcactggtggctattattctgttcaatggcagctattttgagattgccagcagcgccttaggcggcggtttgcttgccgctgcggcagtgtatttactggcttaccgtcagggaatacaaggattcaggctaattatcgtcgggattgcggtcggtgcaatgctgacggcatttaatacctggctaaccattaccgcctcgctggaagcggctctcagcgcagcagcctggggagccggttcgctgaacggcatcacctgggccaaagccgcaccttcgagcctattcattttattggctacgatgctggtggcgttgcttagccgccgtattccgctgctagaaatgggtgacgatgccgccggcgccttgggcattcccgttgaaaaaacccggctcgggctaatggcaattggggttattttgatggcagcggtcaccgccgccgccgggccaatttcatttattgccctggccgccccacagattgcccgccgcctgaccggtacgccttcggtcacgctcattccttctgctttgatgggagcgttgctgttggctgccgccgatttgtgcgcccagcatctgttttcacctaatcagctaccggtgggcgtggtgaccatcagcatcggcgggctgtaccttatttggcttctaattcgcgagtcccgccgatcatgagtaatctgtatgctaaccctgtaaacaccgccgaaaaccgcctgcgagccaaagccgtaaccttaggttacgaagggaagatcatcagtgaaaacctgaacgtttctatccccgacggcgaattcaccgtcattgtcggtccaaacgcctgcggcaaatctaccctactgcgggcgctaagccgcttactaaaacctcaggctggcgaggtaattctcgacgggaaaaatatcgcccgctatgacactaaacatgtggctcgccacctcgggctactgccgcaaacctcactggcgccggacggtatcacggtcatggatctggtcgcccgaggtcgttatccgcaccaaaaactgctccagcagtggacacaggcggacaaactcgcggtactcgaagcaatgcaggccaccggcgttagcgagctagccgatcgcacggttgatgcactgtccggcggacagcgtcagcgggtctggatcgctatggttttggcgcagcaaacaccgctgttgctcttggatgagccaaccacctatctggatattgctcatcagattgaattactggagttattcagcgatctgaaccgcgaacgccagcacacgctggtggccgtattgcacgatctgaaccacgcctgccgctacgccacccatattattgccatgcgcgatggtcaggtggtgacagaaggcgcaccgcgcgaggtcattaccgctgagctggtggaaaaagtattcgggatgccttgtctgattattgaagatccggtttcccataccccactggttattcccaaggggcgagtgaagaataaaggataaataggttcatttggcgctgaaatggcaaagttgggggcaaaatggattcctatgggaaatatattttttcccataggctatttatacaaattttgagcgtatgtcgcgcatatcattgatggaatccatttaattcatggtaattatcaattaggaagaacctatgccacagataacatcaagcgccttcagtagccgacttgcattttttaaccaactgaataataaacccgagacagaaagccgctccagcggaatgggaaaactctctcagagttttaccggcgtgcggaatagcgcctcgtctcaattttttccccgcccaaaaactaccgctgatcaaactgacggctctttccgttccaacctaaatgtgcgccaatccgctaacggcgaagccccggcagcccccatgtccaaaagagtctctattctggatgtcatgaagctcaaaatggaagcagaagggcaaccatttgacagttttatcaacaaacttaagtcggtaaaagtgacagatgctccgcctccgattaaacgtcaggaacttgcacctgcggctccgatagcggcacctattgctccagtgaatgttagctttcaaaacggtgtgattcctccgcctccgccgcctccgatgttctccgcgccagtgaaggccaaatatgtcccaacagagataaagccggccagtaaggaggatattgccaatctggcggctgcgcagttggctaaagtggcgaagaaatcagaacctaaacaccagatgccagcagattttatggcagcattgctcgcaaaattgccgaagaagattgaataaccagtggctgagaaacaacagaaaaaagcagtgactcactgataaatcctctggttaaaatagtcgttagctaaagatagaaaatattcaggccagcatattcgctggcctgatgtttatgagttacggcagtctgttacggttagcagtcacgcttattttcccaaactgccgatgtcactcagcaattggtttagcaagggacccagcactttgagcgtttccggcgacatcatggtgatatgggaacaatcaagctcaaaagtacgcagattcttcacatacggagcccagatctctgccggtgtttcaccttcaggctgggtttgcgtcgccacaaacagcgtggtttcgccgtgataaaccgccgtggtagccgcagataacaggccaaccgaatcgtcatagttagcctgaatctgatcgaacattttacgcttttcttccagctcatcgccggtagccgccataaatagctcacgctcacgttccacttcagccaatgcttcggcttcaattggcgcattccagtcctgagtttcaggcgggtaagtatcgagtaaaccgaggaatgccacttcctcgccctgttcctgcaattttaccgccataccctgagcaatggtgccgcccaatgaataacccattaaatgataaggccccgtaggctgaatgcggcgtagcgttgccagatgctgttcgcacatttcatccatgttggcgcattcggcgatagcgccgccgggacgcggcgattgcagccccagaaccggccatttacctgacagataacgcggtaactggctgaactgccaagcaaaacctgaagccggatgcacacagaacaatgacgcaccggagccttgtcgcaatgtcatcacttcgccaaaaccgatttcattctggttttgtgactgtggctggctcagcgccgctgccagaccagcaaccgtagaagcaaccattacctgacccacggctactggctgtttcaattcacggcgcaaatctgccgctaaacgcatggctaacagagaatggccaccggcagcaaagaagtcggtatccgcacccacggaatctaccccaagcaggctggcaaacatttccgcaattcgggtttccaatccttcagccggagctcgcccgccgttatctgactggctagccggtgctggcaaggctttgcgatccagctttccgttggcgctgagtgggaaggcctccagactcacgataaccaccggcaccatatgagcaggtaaacgctcagttaacgcattacgcaggacttcggtatcgacttccatctgtccggcagtcggtacgatatagcccaccagttgacggctgtcggcaccggccagaacgccttcagacccgaccagcgtgcgagctaccaccaccgcttgctgcacctgcggtaattccaacagcgcagattcgatctcacccagttcgatgcgttgaccgcgaattttcaactgatcgtcgctacgtcccagatattccacctcgccgttagccaaccaacgggcaatatcgccagtgcgatacattcgctgaccgcaatcgaaaggatcggcaacgaagcggctggcggtcagatccggacgcgcatagtatccctgcgccaactgcacgccgcacagataaagatcgcccgccacacccacaggaaccggtcgcaatagatgatcgagaatacgcagctcagtgttccataccggtttaccgatcggcacactattgccagtgatccgcgccagatccgcgccgtaagccggttgataagtgacgtccaccgcggcttccgtaggcccgtacagattatgtaacggcgcagagaaactttgttgatacaactctgacagttcgcgggaaagcgcttcaccactgcagaatacccgacgcaggctggtgcaggttcgtccctgcccgctcatggcgctgacaaaagcagccagcatggaaggcacaaaatgagcggttgtcacgtcgtaatcttccacgatcgcccgcagcgcttccggatcgcgatgagcctccggcggagccataaccaatctggctccagtaatcatcggccagaagaactcccacaccgatacgtcgaagctacaaggggttttctgcaataccacgtcatcactgcctaatggatactcattttgcatccacaacagtcggttaacgatggcaccgtgagaaaccactacgccttttggccgaccggtcgatcccgaggtataaatcagataggccggatgatcgggggtgatagaaggcgcgacaaaatcctgcgccgcaggccaaggctgagctaaccgatccagtaataacaaccccccctgaccggcgaagcgctccgccagatcgctgagagttataattaagcgtggccgggcgtcctggatcatgtaagccaaacgatcgtccggataaccggtatccaatggcaagtaagccgcaccggcttccagtatcgccatcagcgatagactgagatccaccgagcgtggtaaggcgaccgccactcgatcgccggcgcgcacgccctgccgctgtagatgagcggccaacgcggtcactttttcacgaacctgttgataatttagctgctgatggatatccaatagcgccagatacagcggcgtttcctgcgcctgctgaaccatcaggtcacacagcgtcaccgccggtagcgctacgccggtattattgatttcggctagcagggctttctcatccggcgtttgcagatccagcgctgacaccggtaattccggctgataaaccagatattccagcaacataaccaaacgttgtgccacccgctgtggatcttgtaccacatcgcgatattccaactgcaactgcagtttttcccccggaagcgccagcagcgccaacggataatgtgtatagccacggttatttagaccggcgcaacgcaggccgtggaatgcctgttgatgtaacttactgttttcaggatagttctctacgactaacagcgtatcaaacagcgtgttagcaccggccaggcgctgaatttcccccaacccgagcccatcatgctccaacagctgaatttgctgctgttgcaacgcgtttagttgcgcgagtaatggcagatttggctgtaatttaactctgaccggaatggtattactgaacaaacctatatgttgctcaataccttccacttccgcatagcggccggataccggcgaaccgaataccacatcgttgcggccactcagtgcgcccagtaaagtcccccaaaccccttgtaacagggtgttcagcgtcaaaccttcccgacgcagcaaagcgaccaatcccgccgtcagctcgcagcctaactccaccgccaactcccgaaccggacctgatgagttagcttcagggtaaagaatcgagggcgttgcgcccagcatcgcctgttgccagatctgacgatcctgctgaagatctcgctgcgtcatttgattgattagcgaaccgtagctaactttcagtggtgccaacggcagattgccgtaagcatgcagtagatcatgcagcatgatcgaagatgaccagccgtcaccgatcaggtgatgagcaaccaggatcaatgcgtgacgatcggcggtatagcgcaccagtaccgcttccaataacggacacgggctggcggcgatcaaatctttcgcgagcaagctacgttccagattatggaactccacggcctgccgatccgccgtcatttctgacagatccagcactcgccacggcacattcatttgagttgtatcgatcgtcggcagaatttgcagcggctcactgtgcaattcagtgtcaaagatcgccgccaactgtggatagcgaaccagcaacagctccaacgcgccgcgcaggcggtcagcatccaacggcccttccagctcaaaacggctcattgcgttgtagttattcgcctcacgacctagctgggcgtggaacagcaaaccttgttgcagcggcaatactggcagcaccgcgctgacagcaccgtatttctccgtgaccgcggccattaccgtgtctggcagtttaccttctgccgtcggtttacccggtgccctctcgcccataggctgcaacgcctgcgccattcgcgccggagtgcgttgagagaaaatatctcgcggacgcaattgataaccttgccggcgcagtgccgtacccaacgccatagcggaaatactatcgccgcccagtgcgaagaaatcatcatccgcgccaacctgttccaaccccagcagatcggccgtagcctgacaaatcagagtttcttctggcgtttgcggtgcacggctaatttgctgcaccgcgcgttccggtgcaggcagcgcctgacgatcgattttaccgtttaccgttagcggcaactcatttaacaccaccaacaccgctggcaccatatagtctggcagggtcgcggcaagctgttccagtaactggctggaaagctgcggattagcattcagatccgcatctggtaccgagcaatagccgattaaacggtgggtagctccaatagcttcggcaatcaccaccgccgtgctgacctgcggcaatgccaccagcgcattttccacttctcctaattcgacgcggaagccacgcactttaatctggtggtcaatacggccaacgaaatcaagctgtccctccggcgtccagcgcattaagtcgccgctgcggtacatcacctctccctcacggaaaggattcgccacaaagcgcgccgccgtcagatccgggcggcgcaggtagccgcgcgccaaaccggcaccggcgatatacaactcacccatcacgccaaccggcactctctctaacttgttgttcagcagatacacttcggtattagcgactggtcggccaataactggctgatcggaaactcgcgtactggttcccaaggtgtcaatggtgtattccgatggcccataatagttatgaacgtttaattccggatgttgcttaagcagattccacaggcgcggcgtggccgcttctccaccgatcataatgaaggccggacgatgacgcccgttttccagcagaccactgtcgatcatttgagagaagaatgacggcgtgatatccattgtatctatgggtatctcatccatcatttgcaccaatgaataagcgtcgcggcgcatttcttcgtcgaagatatacagctcacagccgatcatcatccagaacaagggttcccaggaggaatcgaaggaaaacgacgcagtgtgtccggcacgcatccggcggcgatgctgccgagcaaattccgccattgccgggccgtataaattatcggcatgcgccaccagcagattgagcaggccgccatgggtgctcatcaccccttttggtcgtcccgtggagccagaagtgtaaataatataagccagatgcgcaccactgagcgcttcacgccgttcggcgtcaacgacaggttgagtcggtaatgccgcacattcgctgcggaaaacctcgtcatccaggcttaacgtcacagcgagttgcggcaattgctcacggatgctgttatgagttaataacaggcaaggacgcgcgtcatcgcacatcaattccagtcgatccagcggatagtccagatcaagcggcatataggccgcgccgctcgccaacacccctaaaatagccaccagagaatcgaccgaacgtggcaaacctatcgcaaccacatcgtcagcaccgacgccgcgagcaatcagcgcccgcgccaattgcgctactctaaccgaaagttgctgataactaagacgatgctcgccgcaggctaccgcgcaatcctccggctgctgggtaacgcgagaatggaaaatatccagtaccgaaaccgcacgggcaggcatggaaatcgccggtccgttggcccattgaacgatagccgccagttcctgcggatcgatcaatgacagttgcccgatcgccacatttggctggcgagcgatctgttggatcaaatattgaatacgctgagcgtgtaaacgcaggctggccatatcgtagcgcgccggattagcggttaactcaacgctaagctgaccttcatccagatacaggttgaactccaaatcctccaccggcccagaagccatttgatgagtgatcccatcaataccggcaaaattcagctgatattcaaacagtttgaaattaatggttgggccatacaaatcctgccctgcaccaaccattccgagatcgcgccgcagttgatcggcttcgtaacgctggtggcgtcgcagcgttttcagctctagagccagattacgcgcgacttcggccagagtgagatcgtcgcgcattttcgcctgtagcggcagcacgttgaccaccggccccagcgcgccaatagccacagaacccattcggcgcataaatggaaaaccgacggaaagatgctgttgcccgctcatacgatacaaatagctcatcaccaaggcaatcgccatatccgccgcagatagacgctgcgactttaccgcttcagtaatggccgaaaattgggcgatatcagtggagaagtggtagcgcagcggcaaaggagagagattctgttcgccgctgtttttcccagaggaagacagacaaaccggcaccggcagctccgccgcgtgctgtaaccagaactcacgatccttagcttccgcttccgacccttgataggccagatattcggccaccacttcgctaaaagcggtaaacggattttcacctgcgggcaatccagacaccagcgcagtatagatctcagctatacgtcgcgttaatgcggtaaaactaaagccatccaccattaaatgatgataacgctgataccacaaccagcgctcttcgccttcaggccgatctttcgccggactcactcggaataacagatggcgataacccggaacattcgcagattcaggacgatccgctcccaaaagatccgcttccatcaaaacctgagcggcgagggcggcatcgtttcgatctcgccaatccaatatttccgcaggcgcgatctgcttaggatcgatggcctgaggaatccactgtaccggcccgttatcacccgtgccaaagcgggcgtggac

(The sequence listing continues in the following parts.)